United States Patent Application Publication US 2012/0108651 A1 - sequence listing, part 2

SEQ ID NO: 365 - DNA, 375019 bp, Homo sapiens
attttgagatgctgcaaagctcactggatttagagtcaagagatgtgggctctagcgccagatttactacagacaggctgcctgaccttgggcaagtcacttatactttcttggcttcaccataatgggctgaactgaatgttctctaaggtgcctctcagccctaacataatatgattcttttcatgagaagagcaggacttgatccccccatcacttgggggcatccccaaggagccccctgttcttcctctgcaggcagccaaggctaattaggaatctgagagaatgagccaggaaaggggcagtacaggacatacattctcttcattgaaggtggtaccccctccccactgcacgatcctcaggaagaattcctttattgaaaccattattgaatagggtagatttaggcacgggaaatgtaaacagcaaaccagccactaaaagtgcgttaatgtcacgcctgtaatcccagcactttgggaagctgaggtgggcggatcatgagatcaagagatcgagaccatcctggccaacgtggttaaaccccaactccactgaaaataaaaaaaattagctgagcgtggtggtgtgtgcctgtagtcccagctactcgggaggctgaggcaggagaatcatttgaacccgggaggcggaggttgcagtgggccgaggttgtgccactgcactccagcctggccacagagtgagactctgtctcaaaaaaaaaaaaaaaaaaaaagaaagtgccttaatgttctgagcaaggataatgggctagagcgtgttccggaagcctcagcacactgcttgttctcactgataggacctcgttcacgagatggaattatgtaaaatgccgcagcaatggttaagtgttggaacaaagtaatacagctttacattaacatggtttattcactagaattaatgacctagagcagtaattgcattttcaaaacttcagcttgctgactaggtgtattgctatgtaaatagctagcgatatttgaagataggaacacagtaaaatctgtaaagtaataggattgtagaaatatggagctggaggagaatgtagtcatcttctagccccgaggctggcaaactttaaaaggtcaggtaataaatattgtaggctccatggccatatgttctctgtcgcagctactcggccgttatggtgcaaaagcagccatagacaaaacgtgaatgaatgggcatggctgggtttcaatgaaagtttatttaggggcgctgcaagttgaatttcatgcagtgttcacatattatactccttttgatttttaaaaatcattttaaaatgtaaaaatcactctcaattggcagatcatacagaaacaggcagtggcctgtagtctgaagtttgccgacctcacttctagttttctcctctcatttcacatgtgaggaaactgagattcaaagtgatcacaggatttacttaagttctcatgactgacgccagagtattttaggagcagactaggagagttttcatgtagacagttggttgttttgatgatgaaaattgaagccacacaaaaattattctccagaagaactcatttcgtatgtgtgattaatactgtgaattagaatgtaccagtggttctcatgcttaagaattcatcagagtcatccaggggccttattaaaacacatgctgctgggccccaccctcagagttgatggttcaggtctggagatcttattttctccattttacaaatggagaacctgaggttgagagagatactcagtctcaggcttaaggtaaaatagctagcttgtgatgtcccccatttccaagttcagcactcataggattaggattagagctataagtaatcatcaagcagagaggcagggctgcagttttgtttagagagatccttctagtctagctgttgcggggagtatggattccagggggccgtgtggaagcacacaactctatgagaaggctgtgcaggaacctggatgtgaagtgctggcagctggacttcaagagtgaaggtcatggaatggatgggtggatggatgagtgggatggatggatgggtgggatggatggatggataggtgggatggatgggtgggtgggatggatggatgggtggatggatggatggataggtgggatggatgggtgggtgggatgggtggatgggtggatgggtgggatggatgaatgggggatggatggatggatggatggatggatggatgggtgggatggatggatggataggtgggatgggtgggatggatggatggatgggtggatggatggatggataggtgggatggatgggtgggtgggatggatgggtggatgggtgggatggatggatggatgggtggtatggatggatgggtgtgatggatggatggatgggtgggatggatggatggatgggtgggatggatggatgggtgggatggatggatggatggatgggtgggatggatgaatgggggatggatggatgggggatggatggatggatgggtgggatggatggatgggtgggatggatggatggatggatgggtgggatggatggatggatggatggatgggtggggtggatggatgggtggatggatggatgggtgggatggatggatgggtgggtgggatgggatgggatgggagaggttcagaaggcctagagggctcatctgtggaaccaggagactgagctgtggggatggtgactaggggtggtcccacccactgagagggtcacagagagaggagcattagaaggtgactccagtgtgtcaggtggtgagtttgaggtgggcttggaaatgcaagagagaggcccgaggctgagatcaagtgctcaggatccttggcctctccacttggagtcatgagtgtagattttaaaaatcatgcaggcggaacatttccagtcaggagagcactgagcccagccctgggtcacaccagcatttgaaggtctgatggaggaggaagagggaccaaaggggagtgagagacctgtacagagtctaagaaggagagtgatgagtcgcactgtgggccttgctctgtggccttggtggcttaggtaatcctggctctgccttaccttgtgtgcgcttgggcaaatgatcgcttctctgcaccttgcttctctcatgcataaaatgcagatgataaagtaacgtgtagtattgttatgaggattaaattagggaatgtaaaatgcttacaatgttgggcatttagtaaatgctcagtaaacattagaggaggccactgggaggagtagaaaagtgagtgcatattttacagttcatgtatttgcacctttgaaatccatatgttgtttgaaaaatgttcttcatttccatgaggaagacgccgctcccagggaaatagtgagtctaagcactttgagaacacttatctaagaggaaggacaatcttagctgtagtcagagtgaccacagggaggaggctctggtctgaaaacatttcagaacaaaggattttaccactaccaccaaaaccaaacccaaaacaaaaccccaaaacaacaactaaaaccttccactgtagtccgtaggtagctcccagggggaattgtccagtgaagcaaaaaactctcattgaaaaacatacacgcataaggatataggccccctctggggaaggaaggggctggcctggagaagaaatccattggtagtggccctgtggagctggtgctaggttcacaagtgttcatttggttattatacctcatgacttatgtatacattgcatatattttgtatgtatcacatacaacataaaaaaatttaaatctatgtattcacttgctttcacagtattcatagcaaatgagtgtctgaagcataggaccagagctggcagcttgcaccgcttctgttttgcataagatattttccccagcccactcagctctataaagttgttttgtatttcaccacttgctccatcttatcttgaagccttgcatatttttttaaatgctggttctgatcatgcttgcagggtgtggctcagaggatcgctgttggaccaatggagatctgcctgggcccagcactcttatgagtcccctgtgatttcatcagcatctgcctttagaaacccgggcgtgtttgttcccatggtaactgctgcccctgacacgcctgaaattcctgggatgcccttgcgtggaaggggagcccgtgctgcccattctacccctgcatggggcagctgcttttctccctcagggtccccagtcctacccaggcaggggtggcagttgttcatctgcagatcctgaaggacatggaccctgtgcctgagattaggacggccgcaccagcctgggtgcaggctccctcaagtgtccttcctcatggacccgcggaccctacgctgtgctgtgagggccggggagcacaggggcttcctgggaggaggactggcttcctgcccctgatggggcctggccacagctcccagggctccatgacagcacagtgaagatagcaaccacatcctgggggccctggatgcaatccctgcctgttgcaaagatgagataaaggcgcgggaaagaagggtctgaattaggggttgagctctgaaatcggacgattctgtgtttcctgccgcatggagggcgtgtgtggttcgcaggctgtggggggcttcttgcagcgggggctgctgcctaaacagactccgcgggccccatgatggcaaaccccctcgccccgttcatgacttaatgcctcctagaagaaaaggctaaaaacaagacacacagaacaagaaattgcactctctcaaaacgacagtcgccctgaaacggacgctggaagaggtttccaggcccgtggcgacggtgaggggggtgaaggtcgcaggtggagggcacggggcggcggctgcggagcccggggaggaggcggcgggcgcccgggtcttcctcggagcgcgccccctgggctgggcggcgtgtccctgcctcccgccggcgccctcgtccccgcagcagcgtccccgccgccaccccgctgcctcgtcgcctttctcgcaaacagcggtgccctctacgtgggggatcctggaggctgctgagcacgagcgccctccgcgacccgcccctgctcccgcctccactcttgcctcggggggagggtctcagtcttctgcctaaggcgccctcctcccttgggaagtccgccgtcctctgccgtgaagattgcccctctctcctccagtgcctcctccccagcggcttcggtggctcccaccctccgcaccccgtctcgcgacctccccgccagcccagcccctcaccagaagaggctttctcttccagcccctgaaatctggcttctgccccagccaggaggctccgcagggcgctccgccaccaggtggcatttcccacaaaccggccactccgccctgacccctctcctccctggacctccgtctcccagttttcctccctccaggatcccactctcagtgtcttgccggattccagtccactgccagccattgaaggcggaggttccttaacccctatcctggggcgagcccttccctctcactgcagaagagcttctcagctaggggggtcgtgcgggcccggagagctgcatttttaacaaactccccacactgacaatctttgccaacccttcccaggcaaatcttgcccccacgttcatggtctcgcctcccagcaggtttggcccacccagctagagctccagctcggcccttcctaagccccaagttgcatagctgcctggtgggtgcgtgttccacaggtacctcggactcgccctgaccccagaacgtctcttctacgccaggccgatccctcctgccatcctctgtctgttaaatggcactgccattgcctgcaggacgaagtccatatttgctggtttggctacagagtccagcgtcgccttcctctgagcagcctgcagcctctggtgcagccacactgcacagcttgcagtttccagacacgcattggcctttgcagtgcggccccgaagtgggaaggccccgcccctggccctggccagaaaagcacccactcatcctttcccatcccagcttgcccgctgagtgactttgaatcaatgattcatgttgtctgtgcctcagtttccttaaccttaaagtggcataataattagttcctgcctcatggaattgtgagtgctaaataaacagtaagtctagtgcccgacataaaagtgctcagcatacgacgatcatgagccatgtctaagcaggcgcaagccctcccaggcttctcatctgcaatattggccatttctcttcatgcctcagtgtcctgtttgagttgagcatgttttttttacaagtgagtctctcctccattggccgggaaccgcccgagagccgggagcatttgtcattcttgatggacccccaggtcttaaatcagtacttgacccttaagaggtgttggccgggcgcggtggctcacgcctgtaatcccagcactttgggaggccaaggcgggcagatcacgaggtcaggagttagagaccagcctggccaacatcgtgaaaccccatctctactaaaaatacaaaaattagacaggtgtggtggtgcgcgcctatagtcccagctacctgggaggctgaggcaggagaatttcttgaacccaggaggcagaggttgcagtgagccaagattatgccactgcactccagcctgggcaacagagcaagactccatctcaaaaaaaaaaaaagaagaagaagcagaagaagagaggtgtttagcaaggcttggttcgtttggtgaattaactcagtgagttaaccaccattaacgatggttaaggacacttgggcgctggctcgatttgactccgagctttaccgattacttgtgtgactttgtgcaagttaattaacatctcagcttgttttctcatctgtgaaatggggatgatactagcatgtacctcctaggactatagtgaacttttaattaagataattattgaatttaacaggtagtttattaatgaaatttacataggtaattgtggcgcagtgagcccaggggctcaaggtgttagcagtcatcaacagtgctatttgaaactgtgggtggatgaagaggtgaactcaacaccacaaatatgacagagcagtaaccaccatggaaaagaaaagagagcttatgtgtctaggacaccccaagaaatctcttctgaatgaatgatggcaatgaaatagccattaacagagggtaggctggtttgtgcagggttggaggcttttccaaaaataaataactttcaaaaaatctcagccaggcgcggtggctcatgcctgtaatcccagcactttgggaggctgaggtgggtgaatcatgaggtcaggagttcaagacaagcctggccaagatggtgaaaccctgtctctacgaaaaatataaaaattagctgggcacggtggcaggagcctataatcccagctacggcaggagaatcgcttgaacccaggaggcggaggttgcagtgagctgacatagcaccgctgcaccctagcctgggcaacaaagcaagacttcgtatcaagaaaaaaaaaaaaatcaatctcgggccgggcgtggtggctcacgcctgtaatcccagcactttgggaggctgaggcgagtggatcacttgaggtcaggagtttgagaccagcctgaccaacatggagaaaccccgtctctactaaaaatacaaaattagccgccgttgtggcacatgcctgtaattccagctactctactcgggaggctgagacaggagaattgtttgaacccggaggcggaggttgcggtgagccgagatcgcaccattgtactccagcctgggcaacaagagcaaaactctgcctccaaaaaaaaaaaaaaaaaaaaaaaaaaaatctcttttcccaatatttgtaatactgggagtgttcaagttgatttaaaaattgagtcaattggaatccatcctcagctcttagctgtgaagggagagctgccccttcttagggatctcacttctcacagcaggggtgcttctgtgtgtggacatcctggtcagctggtcccctgctgtcttgtggggctcacacccaggcacttgattcagcggggtctgggtggtgtctccttcctccttcccaccccagtaatcgctatagccttcccaggcccccaggttgcaaagcactctggactaaacctcctccaggttctgagggctccataggaggaaggtctaggccagaaccggccccatcgctgaaggtggagccagggtggccggccgtgaccggtgtttatgctgtgagagcggctttggccctgcccattgccctggatgggctgccatcccttttcaggagttcaaaaccacatactgagcccatcggtccaaaggaccatcatctcatttgatccaagcacagggcaagggaccacatggacaatggctgctcgtggcaccttcttgccatgcagccatgtcatggtgtcacttgtcacgtttcctggcaccttcttgccatgcagcaatgtcatgatgtcatttgtcacgtttctgttccattcttttcgagcaagcaggaagccacggggctacctcagttgctcttagccagtagctctctccacaggtaggccttcatcggaggggaaaagccaccttagggttccagagctcaagggcgaatgatgctttccacccactaatttaaatacggaagcatcagattgtctgcttctcaaggaaaagagctgttaccatctctgtctcttcaatgggacccactcctgggccccacagcagggcaggtgctcagatgaatggtggccgcctgcctgtgtcagagggtcggcctaggcaggttccccagtccgctggcccgggacgtcctcctctctcccggccgctcactgttcaggacagcccgggcccccccctggggccttgcaggagagcttctgtgatccactgggtggctttgagggtagctcccaggaaaggctgcctcagccccagcgtgatggggacgggtaggggccgatgaggcttcccagagcagcgatggccttaggtattgccagaaggaaacctacttttcctccaagatcagagggaaggatgaggtggggtgttggagcatcaccatatatatacatcacacacacagggaaacactcctacttggatggaggatctttgctgttctgttgaggccagcctgatcctggaggcagggcagggcctggctgttgcccaggctccaaagaggcgccagggcgtcccttagtccttacactttctccagaacctgcgggcagcaggaggcccttgtcgggacaggcaaggggggcggtggtgcggaattgtgggcgtggcagtcggaggtgccaagcccggggaggcggggcttcctgggagcatgcgtagtgccggctctgcctgggcggggtcctaggctgctgctcccgcctcccccggcacaggtagggcgccccgcagacccggacaacgctgggtgtggctgaaaacagggagtcatggtgcgttctggggaagggtcagggctgggggctcgggcccctggaccaaagactctagccaaatccatcggaggctgagcagggcgatggggcagggccgggggagccgtggggaaatgggagggtgtgggccgagcagcgccggaggcaggtaccgaccatcgccgggtttcccagagggcagtggtacctgtgcccacatgtgcggccttttttgtaaaggaacctatcccaacccgaaggcccaaacgtgtggccgtgtaagtttagttgtgcccggagtcccaggagagcccggactgagggcagccagaggccggtgtccgcagaacggcccacgaggccttcggctcagtagcctggagtttgaaatgcaccttgagctttaatggccttttccttgtgagaattcgagttaacgtgcctgctggtgcttttgatgggtgaggacggtgaggcaggccacacatctcgcttctttccagaacacttctgggtagtcgttcaattccacatttaatccaaagccaacagttccatgggtgactgtgctgctggctgtaggaagccgactgtggacagatgaggataatggtctgagtgaattagcaagtctggagaggagcgcccatcagcagaatgacaaatttaggatctttaaagacatctggtcagcgatgccggagctcgtgattgactgagtgattaataatggaaaacccttacttcagtgtttccacggccctcacccacttccccagccggggcggccgtctgctcagcctgccagagacctttccagctgaacaatggcggcatttaggcccctcatctttgacctctgcttgggagttcaaagcttccttttccttctacttaccccacttatctgcgtgttttctaattgatagtgtactgagatggctcccagttcccacgcacatttgctagaatgttaccttcacacagtgcgtaccaaggacctagtgccagccagagcctggcacctcagggtcaccctaggcgtcctgctcatggttccctatcaggggcttccctcagatacacacagcccctgggcctgttgaaaggctgacgttatccctctttaattctgcggtggatttttctccaggctaaggcagctggataagcacagccaggccacagcccagcagctggtgcagctcctcagcaagcagaaccagcttctcctggagaggcagagcctgtcggaagaggtggaccggctgcggacccaggtactgtgcagaacgcggcgcaggtgggagtccttgggcgggcgtctacaggtggatcttttatgcacctcaacaggccggctttctcacggatcacatcggttagcagtaagctgggagggaggtcccgaagactgtgctgggcacagtgcaggacccagagaagcggagccatgggcccgtcctggtgagggagttaaagtccgtgcaggtgaacagaccccggcccgcgaatcaacgaaccacaccgagtgccaagttgcgccgtgcaggctgcggagggtgcgagagcagggagaagcgggaggacggccgtgggcggcagaacaggctttttggaggatggtggccttgagctgcctctgaaggtcgtgtatggtttgaattggttgaggaaagaggtgttcccaattagcaaagtcgtcttgaatggaaggcaggcatctcatcctaaattagctgactgattactgggctaatatctggagtgcttgcagagcacccggcagtgttacacacagaacatgcattaattccctttacccttgaacaagcaggcgatgctgactttattgtcttcatggtttagatagggaaactaaggcccagacaagcattacagctggcaagtagggacaccgcaaacggaggctaagcctgactccacagcccaggctttccccattcaggttagatccggggccaccagcagggaaaagggaggaaggaaagtgtcccggtgaatttggaacacagtatgaaacctcgtttgctaaatcgcttctcttcctgtcagagaggctgtgcattttgccccgtcaagcagtttgttaggataatgaggtggtccgtgggctgaccaaggcctccgcctttaattaggattgcacccaggtgctctgtgagtgccctggggacttcaggcagtaagtgcttggaatgattaatatgaaaaatgcatctggaaatgaaaacgaagaggagtctcattctcctcacaaaatgaccctgtgctcaaggaacctgtaagtactgacttttcccactcggtccaaaatccctctgccaaacatgtgttcacagacagtaaatgagcacacccaggcgccacggagctaaggcctggaggtggaaatgcctctactgtccccatgcttctgagactgctcccagggactgtgggggagcgggccgctcaaagtccgagccacagccgcactgccacagctaatctaggaggcgaggcctcacctggcacgctccatggcagggccctggaacctgaattttgccaagctgttgggatgattctggacgacactacattttgaaaacctctgaagtgtttggagctggaaagaacagagaattattccaggttgtgtcactgtgctgaatcccctgcccccgcttcggacaagtaacttaagcctttttccagcctcagtttctcctctgcacagtgggcatggtgcacgcctggcttcacgggctactgggagtgctgagtgcaggcgggatgccccacgggcccttgggcacacaggctgaggacgtgtgagggtgtttcctttctccctcatcttcagagggtcctgggagaggttcagggaaggcagaggcctgcagagcagcagctgtgggaccagtgccactcccctcccctctgctttcaggatgaccccctcatcctccaccagacccagcccagaacccagccctgtgggcaggtccccagggagggccccagcagcacctgctttaggcctggccagccaaagatcaggaccactggagccactaggtctcctggcaggtgactaggctcttgtcacataggagggagggaccgtgactcctggcatgagtgaatcttcagcctctaaagccaagaactctgtcagacctcaggttgtggggagtcttccgtggaagctggagcacacggcagcttcctttgggctctggactagatcaggagaacgtgggctttgccttttaactccccatctgcctgctttacagcacacttagatcttaacatggatcaccgatgcttagaagcttcttccagggctttaaaaatctggctattgccaaatgagttgcaaaattttcacaaaacgcattaaaaaaaccccaaacctcaaaaaatcctcagaaaaactagcaggtctttctttcttcttttgcctgaagcaacagcaatgatttgcccattcctgtgctatctgatactggcccatctggctcatctctaaagcggcctttcagattcaaatattacacttggagttattttaatatgaacatgacaaaagaaatttggtagagggaatgttggctttcagttgcaaatactagtggtcagagaggaggcagggatccaggtttgcaagctctctgctgaatatctaaacccagagcctgctttttctggctaagcctggccttcacctctaggtaggggctgtcagtgggcttcagcctctgcgatgccttcttgtcatggaatcagcttgagttgtgagttaggcttctgctgagccatgatgtgggcgaggctgctgtaggttcgagcaggtattttggatgcggtgccgcctgagggctccggagtgctcagccaccctctctgttttcctggagtggcctgtgggtccagatcttgggcagctgagggttagagctgtcctcatgtccgggttagagatggtttaactaaaggcttccgttttctcagcctggatgagttaagcttaacttaattttgcatgtcaaactctaaacatctctgtccacttaatacccagaagagaatgggtcgggcaatggttccaaagcaaagtccacccctttccttccctccctgtcctgggtcctgagccccgctgcccctggtggtggggctcaggctggcctgtggcctccaacaggaagtgtctagcctgttggcaggcttcattattctaattgtttctgcttgaattctgaaacactcacaacaacatggctggcagagggagcccctggtagtggtagctgccacatggatgcttttggccacgagaacccccatcctccccgctccccggcgctgtctgcggtgggcaggactcagggcactggctcaagctctcggctcgtttcttggcttttttttttttttttttttttttgagacggagtcttgctccgtcacccggactggagtacagtggtgcaatctctgctcactgcaacctccgcctcccggcttcaagtgattctcctgcctcaggctcccaagtagctgggattacaggcacccaccaccacacctagctaatttttttgtatttttaatagaaacggggtttcgccatgttggccaggctggtcttgaactcctgacctcaaatgatccgcccaccttagcctcctaaagtgctgggattacaggcgtgagccactgcgcccagctgtttttttttttttttttttttttgatgagttttgttcttgtcgcccaggctggagtacaatggcatggtcttggcctactgcaacctctgcctcctgggttcaagcaattctcctgcctcagcctcccaagtagctgggattacaggtgcctgccaccacgcctggctaattttgtatttttagtagagactgggtttctccacgtaggccaggctggtctcgaactcctgacctcaggtgatctgcccaccttggcctcccaaagtgctggcattacaggcatgagctttgcccggcctcttggcttgttcttagtttagggtgactacaaataatggcattattgatctcctgcctcacctgggttcggaaacaacttcaagaaaatagcttttaaatgtcatgaaatggctcttacttgtccttgtggagaaacagacactgaagcactagcccagctttgcctagatgcagttccccacactctgtattccgggagggtcagggcctccagacacacaccctggcctgtcttttgtttgagactgggctgggtagtcgcactctcgccctcttgagaggcaggccctggctgggggaggctgaaaccttggtggtgggggtggggggagggggattcggggtgagggtggtgggtctcaggggagtttgggcagggcctgacagcttggagcagggtcaggggtctgcggcccagagcctgggggctctaacatctggctaggaaggttggagccagctggtgaggaaacatgagtcttggggagaatggcatctgggacaggggaaaacagaaattatctgtccacttagaggatggtctcaaccatcaagatgattttctgtgtctgctttcttatttggtaatgaatacggttttggctgacttgcattttctggtagccgtcgtatcctgagcaggctgcttggttctgtctgcagtgttcaatctggggagtgattcccttttagtcccctcatatgaatcacttacagtttagaaaacagagtcggaaactgacttgtcagtggttaatcagttggccctatgacttttaagcattcttggcagtgaatttactttctaatttgatttaaacttgtgcatggatccagcagccatatgtgattatattcaagatcatcgacattatctcattataccaaaggactcatagaagagagccgaaaacaagcaggggacacagagacacagaagatgatgaagggaggaaaggcccattgcaactggaagcaaagggagaagggaggttctagaaaagtgacagctctcagggagcaagactccctgccgagggaggcctggctgcaaggcggagctgctgcaggctgcccatgttaggccttggaggtgtcacctaatttactgtggtccttccaggagccctgggggcctcgcccagctgacttaggagctaccacaaagttagctacctgtaagacagatggcgcttgaatagaacagcaaatacattgaataaaataaattaaaaagcctcctcctgaaccaagattttttggaaagaattctaaatagatgaaaacaaacaatttgatttcaaccaaattgttgtttttttgtttttatcctgattttcacccgaattgtcagtctcaaaaataaacactgatacattcccagaaaatatttttcaaataaaaactgactctgttaaagtttgccctgattctttcaaaactgtgtacaagacactgtcaaccaaagtgacttgcatatttttttaaataaacttgaacatatgcagctaaaatgtcattaactccctgctgcctgagtgtttttaaaaaatgacacaagaccctgggtgctgcatgtctaacataagcatctcgcgaccttcggagaaacttccccaaacacctccaacagcagacagttaaactttttgttttttgactgagcgccccgtgtataattaatattgaaaagcgcatagggcttcattttagccagacttgctcttccgttaacagttcactttgtccaagagtgagtactttcagaataagaatcatgggagaaaagtcaattgaattttatattccttcagatacattcactctacttattgcttcctgagtcagacattacatttcacaatataaattcacaatcaagattttaaagggagctaaatattttaatccaattagacaagtgaacaaaacactgaatattgcatgtagtgtagataagtggttcttgcctttaaaagactgtaattccgtcacattacaaccccaaatgtcagtgttgtctttatttttaacactttcaaacatgaggcagccagaggctccactctctgctgttggtgacactgtctgtcctttgggaattcttaaaatctatttaccatggaaacatggttcatataaaacacagacctgcctgtgtgtagaggaagttctcatgactcaggggacttgagaaagctggaagatgacaaactcagaccccacggttgggaaggaacccttgggcttgggtgcgccctggggaggacaggtggcaccgcagagccagggcctccaccccggcctcatgtgtgctggggcctccctggcctgtgcggggccgcctccctctccccgccaagtccagctcgagatgctgtcttacggaacgtcccacttcatgtctgcaaggcggccttctctgtggatacctttccattcctctggtttctgcggccctgttcctttctcggagcccagaagcagcaaagccaagccctgcggtggaagggaaggagggctttgaactctgactgcggtgtggaggctgttatcaggggcccagccgggcagccaggagggaagaatggccgctgccctgcgatggccttaaccgtgagcccccgcctgctttgcagctggcagagccaggttcctggaaaggcctgacccggaggggacgaggcccctcagtgagaacttcagtcgctgtgctggggacagcagggccgcaggggcctgagggtggctgactgcccctcggctctgtagaggagtgctcccttctgacaggtgggcggtcctgctcgaaggccgcgtttccccgacgttctgcccagcatgctgagggcacctctctcctcagtgcgttggtggcgagccagagctcacgtggcttatttcatccaggttgccttcccaatttggcagcttaattccgtagatatcaaactggctgcccctcatctgccagagcaagcaggagagcctcgcatgggagagtctggactttgaggtcaaactgcctggattcgaatctcagctctgcgttgcttcagagacatgtgttagctttcatgtcacttgatttctggcagagaaaaagaaagaaccagcttccctttaaaaggaagtgcctcatattacccagagcccagcacagatgattatgaaaccaacaggattagtgctgagatcattgtgggcttgaaagggccatttgagataaataaccattttgtacagatagaaaaataaggcccagagaaatgaagtgaatggaattgggaagtggctgggcagggaaatgaacttcttctcaggccacaggatgtgtggatgggggcaggtacccgagcgggtgcgggcggagccgggcctggctggaacagctgccgagccctggccccggtgcccagaacacgaggcggaggcgggaggcgagccaccaagcgaggcaggggctgccctggagctctgtcaactcagggccagctttgaaatgccccagatggaggtagggggaggggcctgccctctccagttacaaatggatgctttattgccagacacacaaggaacaggaccacgttttgacttggccaaacagagacagcgtgccagtgagcagagcggacagcagggggggaaggggttgttaccttcagaagggttggctagagccacccacggagacagtgaagtgcgaagcccgggcaggtctcctgtgagcaggggcgaggggtgccaccatctccccgggctgccacttctggctggtttgggaacaaagcagcagcaaaggctggctggaccccacagtgtggttgcctggggaacagttcaggtcacccagagcaactgatttcttacactcagaacttaacaaactttagaaataaatgaggcagggtttgtggagagatgactccgataggatttaaaatgagaacaaagaaaatgggttagcagctgtgtgcctgcagatgggggcacgtttccaccacctgtggacagcacggcaggggagcagtggccagggcgccctgtcgcccccctctgagctgcaggacagccacaggagggccacagcaagggccatgatgacaaatggaagggcagaaggacgggagacactggctgagggctcatgtcccactggcatacgcacgctctactctcctggacgagaccatgatcactgtggtgttgatgacaggacttcctggaaataagcatcgtggatatccctaatggcagacaagccagatgtgggcagtaactaaggcttctgtctcggtcagagaaatgtgtgttaccaaagagtcagcaaatggaggcgacaaaacggtgacctcctaggacaaattatccagccctccagtgctgactgaacgctcaccatgggtcaggcacggctgtaggcacgggtgggggggggggcgttgagcagtgaacggtaagttcaacagtgtgaaagtggggatggatatggggcttctcacctgaaccgcaggaaatacaaagcccatagagatggccatggctgatctgccgcaggaaggaatcaggctgacttttgattggttcctggtgaggcccgtacatctgtgtcacccccatgcaggcccacggaatcaggaggtcacccgtttctggaacagctccgatagtgataaattgctaggtggcctgggagcccacaggcattatgtagactcatcatgagaaatgcctgtttcctggagcttatcaaaaaattccgcaacacattttacttttacttcaggtctttacgcctattctgtattgtgtgtacgtgggtgtgttctctacccaaaattcatcactgcagccttgaattctgggctacagcaattctcctacatcagccttttgagtcgctgggactacaggggtgcgccaccacacatggctaatttttacaattttttttgtagagatgaggtctcactatgttgcccaggctggtctcgaactcctggactcaagcgatcctattgccccagcctcccaaagcactgggattacaggtgtgagccactgttgggttgtttttcttttgaagtgttatctgttgggatttatgcttatcccttttgtattcagtcatcctagcatttctaaagttaggaagccactgtgtcaagagcgaggccaccaggccacctgccttatgtggccaatccatggagcaggggtggagggccattcaaaccagtcatttagcaggactgtgctgggtcagttcgatcacctggcctggagggcacgtcagcttggtgcaaaccctgcgtttgacaatcagatcgtgttggtggcagtctccgtgctgtcagtatcccactgaggacagaagggagtcccctctgcaatggcagggctctagggcatagtgcatggggtggactcctcatgggccactcagacagggcctggagaacaaagcatcccgtgggcccaggaaattgtccacctggctccacgggcctgggagggctgtgtgcatgggatggcaggtttacgaggaggagtgaggcctcctgccggagccccacctgcattcagcctgaggccaggccccccacctactctaactaccctgctgagaccaccccactactcacagacctgttcaagaaaaagttgtcctcagggtctctcacacactgggaaatctacttgaaatgtaaacattactttttctcatttttcataaaaggcaacaggctgatgttcatatatttctcttgaatgcggattcagtttcactcattgccctgtcttggaaatccccatgttaatgatggcttaaattaggttgatagagtcctcccttggagtccagcttggaaaatcctcactggagaggggcaggcccacttctctttttggaagatggttcctaactaaagaaagagggaccagattgggcccctggccctgcagtgcgtcccaatttatctgacgtagaaaccgggatttggaaaataccatcctggcttttctctggacttcacaatctagagggcgaggactgtggcccagtcaccttcccacacagtgcacagtagaaactccagacatgctttgtggagtggaaacatttccagtggcttctgactctagttcctgatgtggtttaaactaatttgggcagccatggcagcagaggccaggaacagtattcaatactttctgaacttgtgattctcccccaacctgatctgcatgaagctactttggaacatttgtatctgcgtaaaactaagagacctcagtacacccaatcccctcttccaacacatgtgaggtttccatgtgaaagtactttttcataggttacaataaattgcttgcagttacaaatttggaggtgtttcagcttgtattgtttcacgaggaatttcttaggggcacttggcctacaccctgtttttgttctagaattacctgccgttaaggtcagataaattttcagtaaacagattatggcacaaatcaatgtgtcctttcccggacagaagagatggctctctggccatgtcctaacaccagactgtccttatttaagaggcaggcgtgtcttttgtctaggttgtcttcaaatttaacccattaaaccagttaaccttatttcatatgtgaagggctttgatgtggacaagatgaggcacaaacttttcatataatttccacatttttagcaacaggtttttttctccaacaacagttttcatcataaaaggtgactaaaccagcaaatgagaagacaaataacattgaagaacatgagctattgaaacttactttttattattttttccagttacccagcatgccacaatctgattgctgacctggatggaacagagtgaaataaatgatttacaaagagatatttacattcatctggtttagacttaatatgccacaacgcaccacgaccttcccagggtgacaccgcctcagcctgcagtggggctggtcctcatcaacgcgggcgctgtccccgcacgcagtcgggctggagctggagtctgactctagctgagcagagctcctggtgtatgttttcagaaatggcttgaagttatgtgtttaaatctgctcattcgtatgctaggttatacatatgattttcaataaatgaactttttaaagacttgagttgtaatgtttcctttttatcttgtagtgatgaacaaaacacaccaaaaaggcacatattttaactaggccaaagtatattaaggaccaaactttttttcctgccattcatttttcttttcatgatctatatatcaatcatccttcacctttaatcaatgtcccatcagactccattttatttatttatcgtcctactttgtgcacaatcaatcaatcaggagacaccaggaagcactatgcattactctttccattctgttaaacaacgaaaacagacaaaaaagcatctttggctcggtggtgtcagatttttttcttcaatacgcagtatttgagaggagcctaaaaacgtacttagtgaaattagaaaatttacttagagtatatcaaatatctgtacacagataattatttgtctaaaatagtatttctactatacacaattaagccctcaaatgctttaaagtaataaaaacggacactggacataccgtgttgtatctgagaatgacaaacactaaaggcaaggctgcagttagttaggacaggtccctgaccttcggctgccctgcctggccagcgagccatcatcctcatcaccatctcaacacagagctgatgtcaccatatgctcagccttgcctctcagaagtgatgtggattaggctttggaggcggtggcatgatctacacacagagaccatttgaatctcttgagcatgtaaaaggttcaagcctgaaacagtagaacttctattcagattcagaagttttttatttcatcaaatgtgctagacataaaggctgtcacataagatattttaattgtccttaattctgttttagatatactgtgaataaattatacaatattctaaaaatagcacctttaaagaattatagaggtcacttttttttagcctcctggatctgtcaaccccagtggttttgagagaagagcacatgtgagaatgccctcaaatttggccgtgtgacatacacatacatgcttgactcactctggtcccaaaagccattcctctgtctggcttcgtcacaggagcaaagccaagtttctacaatagtagctttatgaggtaaaatcagaaaaaggccccatccagaatgattcaacgtgaagtcagactgcagtccagccatcctacccatctacatcacccacgtctaagtttgttaatttgccatgacatgttgttagaaatacactctaagaaaggaaatatgcagagcagtacattatcaggaagacgttaatgaaaagctacattccttcagattctgggtccaaaccgtgtgttgtatagatgattcgggtctgaatgtccccagggtctgagacctccttcatccctggcttcacagtacatccatcctaaatccagtgctgagaggtcagcgtttcccctcagaagcagccgttcatcaaagtttgcacaaccgcactactgccatttcactgaagtaaaaatgatcccctatgtgtgtgtgtgtgagctacaaggaattatttctatattttcctgtcacattttatacaaggtaggttaataccagctggggctattaaaaatcatgttttcattaaagaagatttaatttggggggattatagaaccacatccaacaacaataaacagagaagtagcagattgacatagtgctttatttaagctgtctgtacgaaggaaaatcatgttcatccctatcatatacgtgtaaaaatactaaggatgtacagtgtacaaaaacagtttctcctagttattccacatccttgtgggtcatatacttcaggaaatagacaggtttagtatgaccaacagtaatagtaatacagtttcttgggtttatagttgcatctgcttaaaatccttaaccagatgactagatcttgcgcagatctaatgaaagaactagcaaggtcaagaaatgtcacaaactataaagctacagggaggtaattcaattaccaatttagaggttttctttttatttaaataaatactttacatttcatgcttgcctgtaatgcactaccaggagcaagataaggaaattctactgtagacagtacaaacagtagcagcaaagtgtgtatgttgaggtgtaatagagagaccctgcagttagtaaggaaggcccttacttttgtactctaggagaagcaagtggcccctgcaagaacagtcagctttaagaagctggaaatcagggatgggaaatggaaaacaatacttgaataatgctatgtaattagtgtagaaagcaaagctgagcgcgaccctgccaaccatctaagcagaaatggccaatttcctccaagatggctgcattatgacaagaagtcaagcttcatgacagttagtatgggctggagtctgcaaagtctgaactgtattctcatagaatgattccaggtttcagggtgttccacctgccagaacccaaaactacaactatgggcgacacaagggaagttttagaaatctccctctacacgcatttctggttttctattattcctccatggcagctgacagatctggaagtgaaaataggggattctcaaaatcaaagccaagaagacaccttgtgtgacaccaatggagtctcagagggtggaatagaagtgactgagccccaggcatggctgggaactgagagccagtgtgaggagtggcccgcctggggcaatgtcagtgccagtcattaatctttaagaagtgtccttggccaaggtcatgggaatcactttaagatttgcgggagaaaaaaccaaaacaacaaaaagctgtgtgcttagtgttcggtgtcatgctttccctctagaggagtaagtgctctgaacatcagccagtctcagctttctgctcttcctctcacctgtttctttcttatataatggatgcaagacaacttaaagaacataccttctagtctacttttttgtcaaaatgaaacattcaacataattccaagtgaaaaaaaaaagattagctatgtgtgtaagtaagaatgaactaccatttactgtaacttcctactcaatactaaggatgaacttcactcaggtagaaatatgaaaaagaaggataacgttgatgtctgaatatgtcttagctgccttagtaaaatgccctttaacccccgtcagtcccagtggcccacccactgccagcagtggtttcatagctataaatccacacttccagcgtcaagaggctaagacatctgcatatgaatatgattcatcctacttagaaagtcacttgctctttcatacaatgcaatcataatactacgtcatgctgtagtcttccgtttgggagctgtcagagtttaactaaaatacatttccatgatcactccgcggagtaggatggccttctgcttgccgcaagagtggcccccagcccctaggacttcacaggctgctttggaaattgtcagctcctagcaccaaagggtttaatctgaagatcatcattaatgaaggagaaagatgaggtttgcatacatgccccctttcagtgagaaatgttggaatctgggggacatgagtatatacagaaaaagaaaagctggaggtgttctctttttttgttgttttttccctgatggcttaattcagtgataaatgtaccatgatcccaagaaacacaccaggttcttagccttcactgcccatttcctaaatactcaagatgtgttcattttgccacgtaaagatcatttcttatcttcactcaggtctcaattttcttcattactttttgttgccaggtcatcataacgtttcaaattcttaaatgagcaaacgtcaacagctatttgtttcattaaccccttggcatgcatagttggggattttctcattttcagtaccaaggggttaaatggcagcatctcttctcccaaagccaaattctaaccaatatattccatttcagagccttatcattttttttaacagaggagaaaaagtgcatgattctcatcagcgtgtacaatccttgcacatgggtcaaaagtaactgcagtaagtctattttatataagttggagctgcgtttgctaacatgacatacaattctcatcactaaaaaataaatactactgcaatataaacaaaatcataaaaggacattcaaagtttcaacatctgagaaaaagctaattcacgtagaactgaaagtaaaaaattaaataaggcaaacacctgtttaccttggtgtagaaattttggtgaaaagcagtatcattatacctgtctacattcttcagccatcagaggtgataaatgtcaagaaggaaaaaaggtttccaagcacaggggaaagatgctctctggctcaaattgtttcataagaccctttaagtgaccttgactgtgcatatgccttcagttcttggtagaacagtgttcacttgctcatgattgcccgtgaagtctcgacatccacatgtgatatgggcttcttctacagtatccaccaggaatttaaaaaaaaaaaattatatatatatatatatatcccaacagttgttcagtccttctaccaaatgcttcctaatcaattccagccacagcttagtgatatatgcctacttcacgcacggatctgatgtgctttacatatgcacgccaccacccttccacaattgcttgttctgaatttataaactaaatcttcttagtctagttagtttttctcttctagaaagttaaaaaatgtacctagaatcagtgtatctcatttagccttcactgagggaaaaactaaaagatcaaaagatgataattggtgcacaaatgaacaatggtgggctcatgacttccaaaggttggaaaattacttcttaaagttgctataatagtaagacagtagcagcaacagcatgagaccttagactgagatacaatttcatgcaaaaacaaaaactggagtgtatttgcgtgtatgtgtgttttcatgagggtgaaaggtggcgaggggtgaggacccttggctggtctgggatgtcggaaggtgcccctgctatgtgtaagagctaggactggtgatgtccaggaatcattttcagtaataaattgaagatgacagtgaagtagcagaatgaaagagacttattctcgtccacttgcagagtaggaaaattgagggaaatgcggccgcctctcattgtccatgcagtccataccatcctcatcatctgtgggcaggaaacatctattttaattttacacattcattttttgcaacattatctctagtctatgttttttaaactctgaacataggaaagatgaacagaggcaatagctcccataaacttgtgttcatcaataagctgtagagtaattatacttcaaaaatcatctgattttcataaatacatagtctatgaagaaataatactatagaatcatctctaagacatcaaaatttcaagactcaatgaaacagtgaaaaaaatggtattgaagaaaacagaagtttttaagaaggagcagtcttcagtaacctttcatttcatgtaaccacatatatcaaaactgcaagtcagtgaaatccacagcatccaaagtctgtatagaattcatcatcgaatgtcttcaagtgcttatattttttctttgtgatgctttaagtgcaactgcaaaataaagcttcttatgaaatttcattcaacatctagcatctggcttaactcacctttcccaatttccctatgataaaactttagcatgaagggactaagtgaaagaaaaagagggaaggatgtcaacatctgagtcctagctcatcaggaaacaatggaagagacttgaaaggcatcaaaacaggccgctgacaatcacagtgttcctcctgtcagctttcctggtttcctgtatttcaaagatcacagatgatcagcaccctgttctcataaatgtcctgtgatgacagtcctgtgctgttggaagctcttcctggtatgtggccacgtggtcagccactcagtcaacatgcgctcccacgcatctgctctgggctgagcacccgtcaggcccaaggaccgcagaactttgaacaaagtcccaagggccccctggcctcacagtctcctgggggaggtgctccattttaaatcccccgtgcttgcctctaagcttgtttaatcatatgctgtcctgcaatggaaatcagtgaatctttccaatactcaacccttttctcttcaagcaaaataattcgatgtcctcaaacccatataggaagtacattaccaatttttttgaatattctaacctctccagggagcatccgctggatgtgggtgtaaacaaagaaagcatacaggccagatcccactgcactgaggctctgactctgtcactccgaagaggagggggctctgcctttgtctgaagaataaacacttccattcttgtatcactgtttttcttttctgtatcccactcttaatgcagaagattctagaaatgggatcaagctggcattagccaaaatttctgacccctaatgtaccagaagatatcctcgtattaggtgagaactgatccatcaagaagcatttgtggctccctgctctgtgtaagacactgaactcggaggccctctcttcttctgcaaatagaccactgtaactgcagtcagcatttctagaaggtattgagatttggggaaatctctacctccttataaagttattggttccaatatttgtaccaagcaagtcacacacatcttttagatcaaataccttcagcagtatttttagctacagtaaaaacggaaggagctgggaatgatggtgtacccgtggttgagccccagagtataaaaactctctagagaatacgggcagctaaaaccttaatgttcagattctgacatgagccaatcacatttcaaataaacaattttcctcaccaacagctttattttactcagtgtttctgcacagcaaacctgcagctggctctggacagcagtggggagcctggtgcttgtcctgctcagccaggaagggcaggagctgcctggactcctggggccatggccaggactcattccagcccggcgaggttcagcacccaggttagccagatgctcaacaggggcaggtgctagacacccttttggaagaggagggactcttgctggtgtcagctaagaattgagagacagccttcattctgtcacttcagtaacacattcatcacaattctgaatctaggaaatttcacagatatccctgagggccccaatccttgatattctttaaagccaatgatctccctccatcattcctgcccctttctgttgtcaggcttggaaacaatgaggcgtgaacatctgatcatggccctaaaagagctgagagcctgggcaggggctgcggtgggaggggagctggaggaagtggcagctgactctgagtcggagcctgtcaatgtacacaagttagttcctgctgtgagaggctgtgcatagggaatagtgatgataatgaacatgaactatgtttttcaaaaacacttatctggaaaaagaagacaatgatcaactctacttgctacatcccttgaatccctgcatccaaggaacatcagttgcctgattttcttagaacatttaacaaatggcattatatggcagtaaaagcgaccagatctcaaagaaaccctctttttctgtaagaggaaggaggaggaccatcaatggcgataacgaaagatgacacattcccaaatctgttccattattaacgccagtgaggacaatctggcatgtcactgcagctgtttgtagaaaatggaacattttgcctttctaactgctgatttgttctaaacaataactgtattctgttttatacaagcaaggtggcaagtgggaagacaattgctaacgaatggtactaccctggacttttatcaacaaaacctctgtgtgttagcacttagggagctgcaacggtttcttaccagttaaactattcaaagctgcaagaaaaaggttatgttgaatgtaatcaccgttcaaggtttcagtgattctcattttatctgctccttaagggaatctaggatgtatccaggaactgtcaaactaaaaatactgccccgttgccctagaagaacccagaagctgcagttaaccaccatcaaggctgctcccctaagacaggaagcccagggccccatggcccccagtgctgagcgctgcgctctgctgagccacacagacagcaggagaggctgctgaacagaggtgcctgcagatgcgtcgatgctagtctttgcctgggcatactctgctgagctcttccgtctgactttccttgctacagaggtcctgaatagggaaaaacacagcaagtccatagcgccctccccacccctcaattgcggtgtgccctgtcagaaacagatgacattgctgggctctcgtttccgtactgtccagggcccaggagcagggcaggaccacaccccatttctgacacccacaaaagccagacttttttttttttttttttttttttttaaaagacagagtcttgctctgtcacccagactggagggcaatgttgtgatctcagctcagtgcagcttctgcctcccgggttcaagcgatcctcctgcctcagcctcccgagtggctggaatcacaggaatgcaccaccacgtctggctaatttttgtatttttttttgtagagagggggtttcaccatgttggccaggctagtctcagactcctcctgacctcaagtgatccacccgccttggcctcccaaagtgctgggattacaggtgtgcaccactgcgcctagacaaaagccagacttttgtggtcctacaattgcaggtggattttgataaccatcttgaaagttactacaatgtacaggcttcctaggtatctctgtctcaatctagaagtgaacctattatcatttaaagacaccaaggttgtagggcttttacagcatgatccatgtctgaaatgacacatgttatttaagaacagaggtgctgtcagtggtaaaatatgacatgccaggaaaaacattcttgatggcttttatattgctgattaatgaagccaaggaactaggttcaaattatgttctagaaactgtgctgggggacttctaacaccttctaacatttcagtctcattttagaagtcctagagattgagcaataaaatgcacactaatgacaaattctcatcaggacaagtgccccgcgggtgtcgagtaaggaataaagcaggtaagatgaatttcgaagagattctggtccttgaaagctagggctttgaaattcaagtcaatcatgaaaaaatgactgactagcctaagagtcatatacaacagtttctaattgaccttatttgtacccaaatccattttgatttgctctggtctttctagtctcacatttctgagcatcgcattagtcagccctgtccgccggccctccactacaccacccctgcagccaggtgcttgctgcgttgggcctatcatccccctaaatggactggcccacagcatacagtaacactatggactagccaatctggtgcttgagcagaattgaaaatagggtgattcaaattggcagaactctcggtgcctctcctaaagagacggcttctcaggcacacgggaggacaaaaacgccactgagagactatcagccctgctccctgcttttccaggggacaaagtgaccggccatcgcccagaactgtaaggggcacaggcaggacacaaggcaggttccccaggtctgagtcctgggctttttcagcctcactccatgtcccaaattgggatttcacttttagctttcttaagtaaaatatctactcctggcttgacattttagagccttcttatttctatgacttccaaaataacatatttacttgctctaaaggtacgcaaatgccaaatgctctatttaagaatggaaactttctcagaggctgagactgaggaaagagacctgtcaagaccttcctatcccaatatctgctttggatattcagaggggaggcaagcctgggtgtcctcccggctctgaagttcctaggccctcaccatattctgtgtattcatgcacctaacaagtattattgaatacgcacactgtgccaggcatctaactaggagcttgggctaataacgaatgagacaaactagatccttcctctccaacccactgcatgttagtggcggaaatagacactaaccaaacaaacagaaaaataccagcaagtcaaggtgccaatgcagagaatgaagagagagagggaatgttgtcagactgatgctcttcagactaggaggtcaaagaaggttctctgatggaatgacatgtaagcttagagctgaaggacaagaaggagccatccaagtaagatcagggaagaagagcattccaggcctggacaccataaatactgtccccagagcccgaggcatggtgacgtgtggcatgttcgaggtgtggctggaacccagggacagtgggggaagatggaacaggaagaggtcagagaggtggacagggcccagatcagtcagtgctgtgcaaaccagtgtgagcaagtttggatttagagtgcaatgggatggcaccggaaggttttaagcagaggaatgatgtggtctgattacagttaggattatatccaaatgaaagggcctagcaaaggctgtatggcaggaactgcccatgggccgatccgaaaactcactggtgttacccagcattttggacaattctaatgccacagtctatgctggggacagaggccaaggcctatgcccatgatttctactcagcgctgagctacttgcccatgactccacaggctttccaacattgtctgtgactcttagtgattctaaaattctagcaatggcacaagattgagtggaaactctgcctcaccacaggactgaccatgagtagctcacttcaatggattggtatttcacaacttagcctggacatcggtcaagttggtaagccctgcttctggctatggctgacccaacttcaggacctggagcaccttaactttttgtgaatctaaagaaagaaaagcacacacacgtcatcatatcttcactttcagggtgttcacaatccccttgtggccagaccatggtcccaagattaagacctcttggcccacatgaccccttgtttgcctctcgacagtagaatctgctgcctgtgaccatctctggcacagcattagcctccaatcgcccctctcccggacactgagtccacatcagcactatggataaatctgcctccaaaaaaggaatgagaggagaagacatatagggaaggaatcaaaaagaaaaggaaagaaaaactatgatgtgaacccaaagatgtgtaacttgaagcattcttgcagccatccaaatattgccctgaaacgcaatcttatccacattcttaagttaatgatgatacacacagacctctgtcagcatgaaaatgtttatcaattatgtctgatcaccttttccctcattacagctccacttatttatggtatttctccaagtgtgagacatactaatgtatatgaattgacttgaagtggtacatgaacacacagttttcataaatatgtaatttataggtatccaaaagtattagcaaactaaattatgtcttcacagataatactatttaagagagagctaagtaaaaaggagtgactctacatgaattttaaaactattaagtaagtaggagaccaaaactggcaaaattctgaaggttatgtgggaatgaacgaagtctaggaaagaggggagtctctatttcacaatcctttcagttggtgtcaaaacaatctattggtgaacagtaaggaagagctagtctgtaatttcatctacaatttctctctatataatttgtcctacccagaaaagcatttcttgcagtcttttgatattaccactgggaactcaatattcttaaattcaattcaatattcaatattcttaaatagaatggagtaagtcactgtggaatttgatcttgaaaatatcagatgagtttttaaaagactgttttcttcaattacattaggagaaattatattagaaatttatcaattgccttctaaatttacttacatttttcaggtggtgttattgtaatagtctgagctgtaaattcttcatcaaaatatctagtatctgtctcagatgttacttgaggtttaaaaggaggtacaagctgtaaaaagaaagaaaaagagttttattaactgatttcaattcaggaaaattcctttctaggaaaaaagcagagagcacgtagttaaatgaacagaacaaaagtctacaatgctgagtcgctgggtaagggagacatgatatttggcttcccagtcaacagtctaaaccaaccggtgggtaattggtggttctgtataaaatctaatggatcacgaaaaacaacaaaagaaaaccattgaataggacgggagagggatattgaaaaatctgtgctggtttttttccccaataacaaacatacatgcaaaaccatattgatggggagcagtgtgccaggatgtgggctcttcctcgggcaacctctttctagtgctagctgaagagggtagtaataaaaatacaacttaataatacagctatcaccaggttacagatgagagtgctgcctttgcccttcgtaaagaactacaactttgtactttgctaagaatttgctgataagagatgggcattgatgcctgccctgctctggaaaagggtttcctggtagcccctgacgttacatgcaaaatcttgcccacagctttcatcagatcctcaaaggggaccacagcccagaagagattaagagtagctcccctgagattgacagggcaggaatcatctcattcgcactgcacctgcggcaggcatggcgttagggaaggtgggggtggaaggaaagtctcgggctactggaggtttcaggagccggagccctgtgaacctccactggttgggagggagaaggagctaacacgaggctcctgcttctcagggctctagccttgagggacaggtggaacccacaggttccttctagcacaggatgcccagtcccagagcattagggtcagagtgcgtgctctgcagagtatcattcagaacaggggatgctgctttagaatacagttctcacggggataggaacatggcaaacagaatgacagaaatcagcatgttttataaaaattttacaaaaacaaatacacaattggcttgagatcagtgcattttcccactctttctgtcaccaaatgtatgttaaataataaggaaaatctttaaattattctctagacagaactatatttttaagaatcgtgggatgagcagaattaaaagcaggttttcaaaataagggacatttcagtttatggtacatgctacaaagcattcttaatctcttctttttataattctttctgtttacccccagcacacagctattctaaggtcttcatgattagcaagcactcctttggggatgaaccaactctacgttccactgatcagctggtaatggcgactaatccctaaactgaaacaaactcctccaccagtggcaaggagaagcctgccattgtgccagaccatatttctttctagctgccctgctggatcccctggacatgagcaagcaggtcactccactgctagaaaccctccctctgactctcaggctaaattctccacaccagcctcacatatcacatgcacacgcacagggaaccccagaggtgacagaggctggaacaattttgttttttttattttttttagaaaaccaagggggtaattgcccctatctggcagaaaacgggaagactggaattctggttgggtttttctgatttactattctacagatgttcacaaaataggtctttatctttccaatcagaagttaaccacaagaaattcctgtggctggaatcggcttctcttgggcactaggagtaggtttgctcacctctgccccatccttttcatctggttctttgtgatgtcaaaaatttaaatttgccttcaagttaggggaaacttgtccttttagatgagagaatgatgacctgtaactttaacaaactgaaacctatcttaacacagttttcaaaagattataggggagcttaaaatagtctctgtttcaaatgccacgtgtactgaggactttcctgaccgccttcttacattaaacagctatcctccccctcactttctatcttcacattgctttttcttcaagactttgcgacatctgatacacaggcacgtatacatgcacacatatgatatacatgtatttgttactgtcaatgttcatcaccaataaaatataagttccacgagggcaaggactttaaaaaaaagtttattgatgcgtaattaacatacactaaacagcacacattaagaatatacaacttgggctgggtgtggcagcgggcgcctgtagtcccagctacttgggaggctgacgtggaaggatcacttcagcccagaaggcagaggttgctgtgagccaagattatgctattgcattccaacccggccggggcgaacgagtaaaaccctctcaaaaaaacaaacaaaaaacatgcaactgatacgttttgacatatgtatatacccatgaaactgtcaccaaaatcaagatgatgaaaacatctaccacttcaaatgtcttcttgtgcccatgtgtacttccatcctcccatcccctgcaggccatgactgacatactttctgccatgactgatttgcttgtattttaaagaattttatgcaaatggatcatagagtatgtactctttatctggcttgttcatttagcattattactttgatattcatccatgtcaccacatgtatcaatagtttactcactttgctgggtaatatttcagtacatagatgtatcacaatggacacactcatctgtcaatgaacacagggcctgctcccagtttggggcaattacaaacaaaattgctattaacttttatgtccacgtctttgtgtagacatatgatttaatttatttaggacaaatactaaggagtggaatggctgggccgtatggtaggtatacatttgacttttccagaaactgtcaaattgttttcctttaccatgttaaaaaaaaaaaaaacccaattcctaattcactcagagcgtttcattttttgtttaaataagttttaaaaaggatggatttttcttagttttttctttgcatcatttgatataatcatttccttcgtactctgttaataggtgaactatagtgattggttttgaatgttaaatcaatcttatattcctagaacagaccacactggtagtgattctttgtatctattgttagatttgatttgctaaaattaaattaaacattttagcatatatattcattaagaatattggtctatagcattcttttaaaaatctctttgcgggccaggtgtggtggctcatgcctgtaatcccagcactttgggaggccgaggcaggcagatcaccaggtcaggagatcaagaccatcctggctaacatgggaaacccccgtctctactaaaaataccaaaaattagccggctgtggtggcaggtgcctgtagtcccagctactcgggagaatggcatgaacccgggaggcggagcttgccatgagctgagatcgcgtcactgcactccagcctgggcgacggagcaagactccatctcaaaaaaaaaaaaaaatctcttgcatattgatatcaagttaatacctgcctcacagaatgaactgagaaatgttctctcatcttcaattttctggaataatttgtatagaactgataatattccttaaatgtttggtagacttcgttggtgaaaatatgtgggtctggtgtctttgtcagaaggatcttaaccacaactataatttctttagcaggtacaaggctattcatgacatctatttcttcttggtaatttgtatctttcaacatatgtgtccatttcagctaaatagttgaatttattggcataaagttatacataatgcttccatattatccacttaataccaatagaatctgtagcagtgtcaacatttattatttgtcttctcacttttcttttcagtcaggtgagaaatacatcaattttaatgatcttctcaaaagcccagttttcctttcatcaattttctctatgattttttgttttctatttcattgattgctatcccaatctttatttcctttgttctgcttacactgtgtttaacttgttcttatttttctaattcctttttctttttcttgttttttagagacaaaatctggctctgtcacccaggctagagtgcagggatgtgatcatagttcactgaagcctcaaaactcctggcctcgagcaatcctcctgcctcagcctcctgaagcaatcctcctgcctcagcctccttgagcaatcctcctgcctcagcctcctgagcagctatgaccacaggtgcacaccagtatgcccagctaatattttgttatttagagatgggatctcactatgttgtgcagactagtctcgaactcctctaccttggccttcaaaagtactgagattatagttgtgagctactgtgcccagtcctagtttcttaagatagaagctaaggtcattaattttacacttttcttcttttctaatgtttaaaaatatcttttagtactataaattgtatttagtactataaatttaagtattgctttagctgtatatcacagctaaacacattgtgttttcgttttcagtccattcaaaatactttctcatttccctttgatttcttctttgatccatggattaatatttagtttccaagaacttggggattttccatagatctgtgtttttttaatttcatttccttcaaagagaaaatgttttacagtacttaaatcctttaaaattcatggagttgttttgctcaacatatggtacactgtgataaatgatctgtgaccttgagaaaaataagtgttcttatgctgttgggtagcgtgttccataaatgtcagttagatcaagctgactgatagtattgcccaagttgctatataaccttaccaatttctctccaattgctgtatcaattatttgaagatggatattgaactgtccaatagtaactgtaaatgtgtctatttttccttatattagtttttgcttcaaatattttgttttgttattagatgcataactaagacggttaatacttcttgatgaaatgactcccttaattattatgaaatgttcctccttatctccagcaatattacttgctttgaaatctacttcatatgatttaatatagcactctagttttcttctgattaggttgagcatagtatataattttctgttctattaattttaatctacttatatcttacatttaaagttggtttcttataagcagcatataggtagttcttgctttttaccaagtctaatctctgtctttcaattgtggtgtttagaacatttacatttaatgtgattattgatacgagtaagattaaatttaccatcttgctatttgtttcccacttgtctcctctggaactttgtgttgcactaatgtgatattcccaactcctaaaacagtccttgccacatagtagcattcaacaatatttgcggaataaatgaatcaatcattcagtcttgcagctgagtaagacgtcagtgagcatgtagtgtacctttttagagatcaggaaattaaagctgacactggttaaatggcttgccaaaaattatacgaataagaactggagcggcaaaaacctaggtttcttgatctcaaggtctttttactgtagcatttacaatgtgaaggctttgaatgaaaactacttttgcttttgattgtttctctatacattagtcaagatattcattctaggaagcattattcccccttccacttcccctgtccctgaaggtgaagacaactcagtggaatataaacatttgtagggaagcaaagaccctacattatgtatatggggaacattgtcgggtagggcttgtaaaaaattgcctcagtatggctgggtgcagtggctcatgcctgtaatcccagcactttgggagtctgaggcaggcagatcaggagtttgagaccagactggccaacatggtgaaaccccatctctactaaaaatacaaaatttagttgggtgtagtggcacatgcctgtagtcccagctacttgggaggctgaggcagaagaatcacttgaacctgggaggtggaggttgcagtgagccgagatcatgccattgcactccagcctgggtgacagagcaagacctcgtcaaacaacaaaaaaaaactgccacagtacttgaacagaagcagtcccacaaaaatcatcagaatgccccaacttcagatttcattacaaatttctagaatatataatattcttgagtagtcttcataaactttatggaaaatgtgtattatgaaaaaaccatgcacagatttcaaaaaatttctgcaccaaaattaactcatactgatttgttataacatgactgtacaggatcaagtttgagggactaagaaggataagacatcagtttggacagagcccctgtaagagcaacatgaattctaaaattgaagcaagaacaaacatgaaattcatggtgaagcttgggtggaagaatgattaaatcactgatgctttatgaaaagttatgggaagtatgccccaaataaatcagcagtctaaaaatggataacttattttaagaagggatgagacaatgtggaagacgaagccagcagcgacagaccatccacatcaatttgcaagggaaaaaattaatcttgtttgtgccctaattcaaaaggaccaatgattaacagcagaaacaacagccaacaccatagacatctcatctggttcagcttacagaattctgactgaaaaatttaagttgagcaaactttccacttgatgggtgccaaaaccattgcacccagatcggctgcagacaagagcagaactttcaatggaaattttaaacaagtggaataaagatcctgaagcatttctttgaagaattgtaacaggagatgaaacatggttctattagtataatcctgaagataaagcaatgggtatgaagaagtggaaatggtccagtcaaagcaatattggacaggtcaagggcaaaggtcatggcaacagttttttgggtgctcaaggcattttgcttattgactttctggagggcaggagaatgataacacctgattataagcacttggagaaagttggccaaagctttggcagaaaaacttctgggaaagcttcaccagagagtcctcctccaccaagataatgctcctgctaaatccctctcattaaacaggggtatttcatgagagctttcatgagaaatcattaggcatccaccttacagtcctgatttggctccttctgacttatttttcccctaaacttaaaaaagcttttaaagagtattagtttttcttcacttaataatgtaaaaaaaagactgcactgatataggtaaattaccaggatgttcagctctttagggatgaactaactagctggtatcatggcttacaaaagtgtcttgaacttgacggagcttatgttgagaaataaagtttatattttctgtttttatcttttaataccattttccatgaactttttgaagtcccctcatatttactttaaacaacagctgaacaaatttcaaatattgtattattataggttgaaatgtgtccctccaaaattagtatgtttaaaccctaaccccaagtacctcagaatgtgactctatttggagataaggtctttaaaaaagtaactgcattaaaatgagatatcaggatatgtcttaactcagtctggtatctttacaagaagaggaaatttggacacccaagtagacacactaaggaaaaaccatatgaagacacagggaaaagacggccatctgcaagccacggacagacacctcagaagaaactaaccctgcctgcaccttgatcttggactttcgccagaaatatgagaaaatgaatttctgttgtttaaaccacccagtctgtggtattttgttacagcagccctagcacataaatacattaatttcctatttcagctttaaaccagtatcttcatctcttcttttcctctaaccacatctctcaaaacatttctgtcaactgactgaatgtaaattcccatttagaaaagatagtcatatatatttctgtaaatctcagctacttttatggatcaactcaatgaacagctatagtgtcattaactgcaaacaacatatttttctgacaaatgcactaaacttgaaacaaatctttatttgaaaaccaatttgctttcagaaaatgtagtattcagtgatcttaaacaagaggataaagtttctgggttcaagacatcaatttcatctcactgaaaatatgcaacttcaagtccgtatggtgacagcaacgttgaagctccctaaattctttccacactgatcttttatcaaattttaaatgctatgaaatcactctaccatttactatcttcctaaaagtgtcaatgaaagaacaaagagataattttctgaaggttgttagagtaagtcacatttggtatttctggtatggctggaatgattccatgagtgtatgcatgaacaccaaggtctctgaaggtaagagattccacagaccttttttagtaacaagtcacgtgctactatcagatatctatattctttcttctattgttccttccaggggcttaagaaatagactggagaacttgaaactttctgggacagctgatgtggacagtgattgtggtatcttaattgccttaacaactgtggttatttccaccactttgtgttggcatatagggtccaaaatccagtgaacatagatgtttgcagtaaagaattgccaacactattgcatgtttagatttcccagagacagtaatctggtgctataattttcacttctctgaaacaacatgagaaagtagtcaatcataggtggagattctggtttatttaatctctactaaatactggcttcacgctttgtgtatatgtaggtgtgcatgtactggaaaagcaggagtataaaagaggatttatttctaacaaaactaatgggtatgtggcatacattatttagttactttgtatgctaagctgtgccataccaatgaattcttcttgacataaaactagaaactaaaataattatatttcatttttacaaaactacacagtaataattgaagttcatgctgttaatcttgtgcctacataaaatgtaccaaggggcccaaggtatataacaaattaatataccactattgtatcgtaatattagacctgccaaaatgagtactttaactataaaagacattaaatgtttaattaatacatctgctttccttgttggaattctgaggggtttgttaacacatgatatggatgatttgcattactttaaaaagtaatccccagaaactggaacttgtattttcttttctgtgataaattttctcattcaaaaataacttcataagcactcatcctattgactgtaggtttatgcccaggtgatgttattcacaaacatccatagatacgatacattatttgaagatctcagttatacctggagaggattcacctataaattacaacaaaagggctctcattagtgaaacactgggagcctttttaaaaggcatgagagggtaacaaaaagattttgcacctagtagtgttaaaggacaagttgcatttattataactatcagaacttcactaagagcctagtgaaacaatctactttctcccttcttcagctgattttataggctctgtccaacatcagcagtgtggcagccattaatcactatttctcttagaaatattcaagaacatgagcaaaagttgaataagtatgcagactggggagaaatgacataaaggcaatttccaacttacaagctaattttgttataaaagcctatatatgtaaggctgggcacagtggctcacgcctataattccaacaatgtaggaggccaagttgggcagatcacttgaggccaggagttcaagactagcctgagtaacatagagagactccatctctacaaaaaaatttaaaaattacccaggtatggtagcatgtgcctgtgatcccagctacttgagaggctgaggtggaaggttgagggtgaagtgagctgtgattgcgccactgcactcccctgggtgacagagagagaccctggctcaaaaatttaaaaaagaaaagaaaagaaaaatgcagcctacatataaactggaaaaaacttgggacctgtttcaatagatacacacacatacacagaaaggctatataatgtaggtaggttactaggcagtaacattaaggtctattaaaccagaaataaataaaaaatataacattaaagcttctaacaagtatctattatttttatagagaaattcctattatatttctgtaaagatgacgtgaccaagaccctctctctctctctgtccaggttctagcactgacagccacagccactctcttaataccacaccagatgaatgctggagagacccagtgatagggaacatttgggttgggggatgaacttgtggtgagaaggaaagataggggctttaaaagctgaggaggaagaggtagaaggtcaatttgaggcataggggcaggcagcaatttctatgttctgcaaggaagctattggagaaaagaacctgtatttatccagagctactatgcccaggtgctgtactaattaagtgaatgcaggaaaccaactggaattttatgaaggacacagaagatgcaagctatgttttgaagctctggctccaaaaaggacgaacacacacacacacacacacacacacacacacacacacacacacacacctttcagaaaccaattggatatccaaggctccccttgcaggtttgtactgggcagctaaacatcagaacaggaacaggcaaagaaatcacaagtagtacttcctgttagcctggtaaactctcaaacaggactttaaatgatctgaaatactctattccctaaaaagaaaaaagaagtatgttttttgagcatctcttcaatgtgtctttaaactgacaaaatattcacattgaaaataatcttatagatctagtccaatcccctcattttaagatgaagaaaacactgagcccctaaatattcatactaaagtcatactaaagcatcacaatatcaaccaccacccaattaattttaatccaatcctaactgcagcttctataacaggtcctttactcttaaaatctgggtcaggcaacctctgaaatacttctaccacctctgaaacacaacccgcatcacatgaaaatgtaaatcgcctgcttatttatctgtctcttctactaaactgtaagcaaccgtttgaagacagggactttatcttagctatctctgcaaggctagctgttggcacaatacttaccataaactacagtcatgtgtcacttaatgacaggggtctcttctgagaaatgcatgttagttgattgtgtcattgtcaaacatcatggagagtacttacatacaagcctagatggtgtaacctacaacacacctaggccatatgggatggcctactgccctaggctacagccctgtacacgttacagtgctgaatacggtaggcaactgcaacacaatggtaagtatttgtgtatctaaatgtagaaaaagtacagtagaaatacgctattataatcttatggaaccactgtggtatatgcggtgtgttgactgaagcatcattatgttgtgcatgacttacagaaaagcactaaatatttggtgagtaaagacaagaaaatattcacaggaggttctttggtgttttggccactggtgccaaacaccaagcaccagcctctgctgactcctgaaccatacataccaggcaccagcctctgctgactcctgaaccatgcatgcacagggaagcctccaagctccctagtgaagtctaaaaggcattgtcaaaaggtaatgaaattacacgttctctaaaaagaggtctgaatttgttactgagaattgggacaaaagagaaggggaacagccatgaattatgttttggctgcactgaactaaccataacattcactggtaattcacactgtttaaataagctctctcacacaagctctttagaaggttgcacaaacgtgaatctgtgagatacttccttgcatgaatacaaaacactgctgtgccacatgaagaaaaggtgtacatctggcatgcaataatgcataattaagaacaaatactcagtttcacttacaatcatggtcaagcagctccgattggattaaccctcctccatataactgtaacctcaggagaaagacatgaaaacaatctaaaggttctgggaagcaactaaaaacaggcaggtactaaagaggaggtgggcactaggaataaggaatggcaccaaatgaatttctcatttttacggctttttgcctgaaggtgggccccagcttatgccatttagggtaaaaatcttaaattagaaacccacagttctactgccatgaacaatcagaggacagagcttgaacaagtacagcagcttttaagtgaaggaggtgaaattccagaaaagaggcagccaaagagaagaagccctaaaatctcagtataaagtctgcccagatctctgactcttgaaccacacatgcacagggcaggctccaagcctcctagtgaagtctaaataaaccagcctggaatcttaacccactggaaaaaagaaagcgtttgcagtttgagttcatccatgatgactggcctaagaaaataaaaaattcagtattctttgctgcaacctaaccgaattcagaggcacaaaataccagtcacaatgcccaggatatattccaaaatgactcagcattaaaaaaacaaaggaaacagaacccatacactagaaaaagacatcaaaggaaactgatgctctgatgatctcatgttgaaattagtagacaaagactttaaagcaactttataattatcttcaatgacgtaaagtaaaatatgttcatgagtaaaaaagttgaaaatctcagcagagacacagaaactattaggaaaaggaccaaatggaaaaacctaaaataaaaaaaaataaaatatctgaaataagaaattctctctatgggcttggagcacattggagattatgtaagagtcagtaaacttgatataccagcagagattattatccaatttgaatagcacaggaaaacaatgtgaaaaaacaagcagaacttcatacctgttggacaacttccaaaagtaagaaagaaagaaagaaagaaagaaagaaagaaagagagagggagagggagggagggagggagggagggggaggaggagagatagataataagacagaaaatatatttcaagaaataatggctaaaagttttccaaagttaaagaaggatatgcaagagattcaaaaagctcaggcaactccaagcagaataaatagaaaacctcacctaaacacattatagtcaaaaggcttaaaaccagagtctgtcacggttccatgagagaagcagaactactctgtgtgtgtgtaaagagattacaggtaactgaatttccctgattgtgggagctagttatgttgtctctgtaaggctgttgtctccaagttcactgctgaggcttcatgtccataggacagtaagttgagaagcgaagatgcaagcaaagccaggagaggaaagatgaaatggaatctagaagcacaagctggagcccaggaggatagactgaaacccgtgttaattcgtaccgcctgaccttgctggtgtggatatcctgcaaaagctgggactttcatcatggagctaaacacacactccagcccagaagtaggctcaagggctaacaggatgcaggaggaggtggagctgatgcaggcctgaccactgccacgtaccaataagatggtctagcagacaacatgaatgagctacaaaatggctgttccgtcacgtctatcctccaaatctcccacgagaatcttaaatagcaaaaggaatcctgggaaaggtggctcagtctagtcaactgacatattacaaagccatcacacaaacaaaaatatcttgaaaacagccagtgaaatataccacatgacttgcaaggaagaaatatttaaatatgtactcactaaactatcaacccacaattttatattcagtaaaaatatcctttaagaatgaaggcaaaataaagacatcatcccataaaagaaaacaaattttttgccagctgcactacaaaaaatggttaaaaaaaaaaaaaaaaaaaaaaaaaaaaaaaaaaaatttagactgaacaggaattattccagacgaaaacatggatctttaagaaaaaaaaatgaagaaatgaaagtgttctcaaattagacagcggtgatggttgcataagtctgtcaagaccctaaaaaccatggaagtgtatactttaaagggtgaattatctcaataaaaaattaacaaaagaataacactggaaacagcaaatacgtaagaaaataataaatactaagagtcctaacttagaatctgggacagatatgaagattaatcttcaaacagaaacacagatgtttaatgaataaaccgaaacacttaaaattaatatagtaaggtctggaagattcacttaggccctttcagaggagacattatttcattgaggcctctctgtgccttgcacatgatagataaaaatattacttatgtaatcagttgccatcctattgaaatgagtatcaaccaagtgaccaaaataaactataaagtacctaaattactctctagaggcaagattttttcttcttttctgaaggaaatctctgaaagataagtaggaatgcaataagtattaagatccatttcaaaataatccaaacattctaaatcaatcttcctagaatacctcttaaatcttttctaagttgtgctttatataatacttatataattatgttttataatcattataattttttctttcgaggaacaaggctttagcagtcagcataaaattgggctttgggattttcaacctcagctgggccctccagcaatcggtacctctttataggtccctacttgggtttctctctagctccctctgagcctatccctacatgtgacagtcactgtcttaaaacttctaatatcaaccataaaacattcttctcactcttaataagaaggcagaacttctgccataaagatggtgggacttatacctgtaggcccagctattcgggaggatcccttaaggccaggaattcgaggctgcagcgagctgtgatcgtgccactgcactccaacctgggcattacagcaagactccatctcttaaaacacacacacacacacacacacacacacacacacacacacacacacacacacacacacacacacacagagagagagagagagagagagaatttgaggccttcagtcagaaactaccataactttctgcctaaataccataactttctgcctaaatgcttataaacacatctgctctggtgggcgtcttacttctttccaattgatgtcactacaagggtatcccacctcctttctataggttagctatgcttcagagatcttacatttttttctgtatttactcactttacatcttactatctgtatgtttttatcttaaatattacttgtttctatgtagctccaatttcacactcccttttggatcattcctgagtgtatgaaataaatatcacccattctacatgctccctttagctactgctcctttcttaactcttcaattttctctattttttaaattttaggttgagtggcacacacgtaggtttgttatataggaaaactgcatatcatgggggggtttggtgtacatgtcattccatcacccagataataagcacagtacctggtaggtcgttttttgatcttcaccttcctcctgccctccaccctcaagtaggccttggtgtctgctcttcctctctttgtgttgatacgtactcaatgtttagctcccacttgtaagtgagaatatgcgggattttgttttctgttcctgtgttagtttgcttaggcttatggcctccagctccatccattttgctgcaaaggacatgatcttgttctttttgatgactgcatagtattccatggtgtatctgtactacattctttatccaatctgtaattgatgggcatttaggttgatcccatgtctttgctattatgaacagtgttgtaatgaacatatgtgtgcatgtgtctttatggcagaagaatttacattccaataatgggactgctgagtcaaatggtaattctgctttgagttgagatattgccaaactgctttccacagtggatgagctaatttgcatttgcaccagcagtgtataagtgttcccatttctcacaatcttgctagcatctgttattttttgactttgtaatgagggccattctgactggtgtgagatggtatctcacagtggttttaatttacatttctctaatgattagtgatgttaggcattttttcatatgcctgttggccacatgtatgtcttcttttgggaagtgtctgtccatgtcccttgcccactttgtaatggagcttttttttttttttttgtaaatttgtttaaattccttatagattctgaatattagacctttgtcagatgcatagtttgcaaatattttctcccattctgcagaggtctgtttactctgctgatagtctcttttgctgtgcagaagctctttaattaggtcaagttttgtttttgttgcaatggcttttggagtctttgtcatgaagtctttgccaaggtctatgtccagaatggtatttcctaggttatcttatatggcattttttataattttaggttttacatttaagtctttaatctatctcgagttgatttttgtatatggtgtaagaaaggggtccagtttccaccttctctgcatatggctagccagttatcgcaatatcatttattgaagagggagtcctttccctattgcttcttactgttgactttgtcagagatcagatgtctgtaactgtgtgacatttctgggctatttattctgtcccattggtctatgtgtctgtttttgtaccattaccatgctgttttggttactatagcctgcagtatagttcaaagttgcgtaatgtaatgtctctggctttgttctttttgcttagtattgccttggctattcgggttctttttcgggtccacatggatttaaaaatagtttggtttttttttctaattttgtgaagactgtccttggtagtttgaataagaatagcactgaatctgtaaactgctgtgggcagtatggccatttcaacaatattgattcttcccaaccatgagcatggaatgtttttccatttgtttgtgtcatctctgatttctctgaccagtgttatgtagttctcattgtaaagatctttcacttccctggttagctgtattcctaggtattttattctttttgtggctattgtgaataggattgcattcttgattttgctctcagcttagatgttgttgttgcataggaatcctgatttttgtacattgattttgtatcctgagatattgcttatgttaatttgtcaatttttgttaggttgtttattggattgtagagcttttgggcagagaaaatcgggttgtttaggtatatagaaccatactgtctgcaaacatggatggtttaacttcagcaaatttttaaaaacctgaaatcataccaaccacactctcagaccacagcacaataaaaacagaaatcaatactaagaaactctctcaaaaccatataattacatggacattaaacaacgtgttcctgaattacttttaggtaaataatgaaattaaggtagaaaccaagaaattctttgaaacaaatgagaacaaagatacaacataccagaatctctgggacacagctaaggcagtgttaagaaggaagtttatagcactaaacgcccacataaaaagttagaaagatctcaaattaacaatgtaacatcacaactagaagagctagagaaacaagagcaaagcaaccccaaagctagcagaaggcaagaaataaccaaaatcagagcggaattgaaggaaattgaaatgcagaaaaagtacaaaagatgaacaaatccaggagttggttttttgaaagaattaacaaaatagactgctagctagaataactgaaaaagagagatgatccaaataaacacaatcagaaatgacaaaggggtcattactactcttcaattttcttgagtagcctaagcttggtgttctatttcttttaacttacacttgaattgaaaataaaaaaagaactagtttaagcattaagagtagaaaataagataaccaaatctaatggatgttaacattgtactatatgtattttcaaacatctgtttttttcagatgtaaaatagttactgctaaatacctaccttcttcctactcattgatgttcaaccattctatctatctatctatccatccctctctctatcttttgagatgaggcctcgttctgtcacccaagcttggagagcagtagtgtgatcacagctcattgcagccttgatctcctgggctcaaatgatcctcccacctcagcctcctgagtagctgagactacagtcgtgcaccaccatgcccggctaattttttgttatttttggtaaaggtggggttttgccattggtcttgaactcctgggctcaaggaatcctcctaccttggcctcccaaaatgctgggatcacaggaatgagtcactgcacctggaaatgttcaaccattttaacctgtgagaatggcaatcacctatgattcaagcaaatattgtcctgaagttacttcatatcatttgcatgcaagtttttatagttttctcccatatatatattttgtcataaatacaatgctttttatggtgcattttcagtttttgtagtacggtattctgtaaatatcctcagtattttgtttttctgtgtttgttttttgagatttatcaatattgatacttataaatttgagttgttttttattcttgaatagtattctaccataagattaagaaaaaactgcactgaatctgtattatcattttgagtactctcatcttaaattaaatatccaatatataaacatgagatgtctttccattcatttatgtcttcttttatttctttcagcaatgttttgtagtcggtagtgtataagtcttgtgcttccttggttaaatttattcctaagacattttttgatgctattttaaatgaaattgatcttcttaagatcaattttacattgttgatagctagtatatggaaatacaatgtattttctagcttgcttttgcatcctgcaactttactgaatgtattagttctaagcacaagtgtggcacgtgtgtgtgtatgttttagggttttctacatataagatcatgtcacctattagtaggggtagttttatttcttccttgcaaatttgattgctttttatttctcttatttaactcctctggctacagcttccagtgtcacgttaacagaaatgttgaaagtggtatctttgttttcttccttatctcaggggaaaaactttcagtctttcaccattgaatataatgtgagctgagggttttccaaactatagaaatgatcccttaaaggacagtctttccaagaatttttcatatatgacctttataatgttgtggcagtttccttctattcctagcttttttttctttttactgtttttatcataaaggagtgaattttgtcaaatgctgcccatcagttgaaatgatcatgcaagttttctccttcattctattaatgtgggacattacactgattaatttctatacgttgaacatccttgcattcctggaataaatctacttggttaaggtgtacaatcctttaattatactgctgaatggtttgctagtattgttaagaaattttgcatctgtattcattagggacattggtctgtagttttcttttcttataatgcctctagttttgacatcaggataatgctcccttcatagagcaagtgagagagtgttcactcctcttcaaatttttggaagagtttgagaaggactggcattaatttttctttaagtgttgggtagacttccccagtaaagccaactggccctgggcttttctttggtgggaggtttgcgattagtgattttatttctttaagagttacggggtctatttggattttcaatttattcttaagtcattttggtgatttgtgtatttccaggaatgtgtccatttcatctaggttactcaacttggtggcatacacttcttcagagtatcatcttataaccctttctatttctctcaagtcaggagtaatatcttttttcatttctgattcagtatttcatttttctctttttcctccttagtcaatccatttaaagttttgtcagttttgctgatttttcaaataaccaactttcggtttcggtcattattctctattgcttttcaattatcgatttcatttatttccgttgtaatctttacaccaataaattggttaaccaaaataatgaagaggtaaaactaccaaaaagatataacaatactacaatttgggtgcatctacacatggaactaaaaaaatgtcaaaactgatagaactataaacagaaatagtcaacgccataattatagttgaaggtttcacttctctcttagtaactgataaaagcaagccattaagctatcagtaaagatgcagaagacttaacactattagccaattctatcactgacatttatagaatattctacacaagagcaaagtacctatggcaattgtactatctgtgaaatgaatggtgctatttaaaagaggacttgaattagttataagtgtatacttcaaactcaagggctggcagttaaaaaaagttaaaaaagcataatttattcaattaatatgttatgagagggaaaaatgttgccttatacaatgctcaattaaaccagagaaggcagaataaaaatgggatacacacacacacaaagaaacagcaagggcaatggataaaaaactgtaagaaggccgggcgcggtggctcacgcctgtaatcccagcactttgggaggctgaggtgggcggatcacgaggtcaggagatcgagaccatcctggctaatatggtgaaaccccatctctactaaaaatacaaaaaattagccgggcgtggtggtgggcgcctgtagtcccagctactcgggaggctgaggcaggagaatagtgtgaagccgggaggcggagcttgcagtgagcccagattgtgccactgcactccagcctgggcaacagagcgagactccgtttccaaaaacaaaaagaaaaacaaaaaaacctgtaagaaatccaactgtatcaattatcatttttaatgtcagtggtctaaagacatcagctaaaagacagagacagtcagagtagataaaaaaaacaagatctaactatatggtctacaagaaacccactttaaatataaagacactgatagattaaaagtaaagggatggaaaaaagataggcatgctcatagtaatttaaagaaagtgggaggagctatattaatttaagacaaagtagggcaaggaaaactatcagagataaagaggggcattacataatgatacctgggccaattctccaagaaaacataacagtccttaatgtgtatgtgtctagcaacagaatcaaaatacgtgaggcaaaaactgatagaactggaaggagaaacagatgactctactattatagttggacacatcaacatgtccccccagtcagttaaggacataactgaactaaacagcaccatcaatcaactggatttaatatcaacattatggaatattttatccaagaaaagcagaatatgtaactcttctcttctcacacagaacattcatcatgacagaccatgttctgggccataaaatgcacctttaacaaatttttaaaaatcatataaaagtatgctctcagaccacaatgaaattaaactggaaatcagtaacagaaagatagctggaaagctccaaaatacctgtagactaaacaacacatttctaaacaacacacatattaaataattcaataaaacttaaaactatttgtaactaaatgaaaataaaacatcaaaatttgtgagatacagttaaaataatgcttagaggaaaatttatagcattgagtgcacaaattagaaaagatcgaaaacaaataatctaagctttcaggttacaaaactagaaaaagagaaaattaaatccaaagtaaggagaagaaaagatataattaaaattagagcggaaatcaatgaaacagagaacagaaaatcaatggagaaaaactaacaaaagcaaaagccagatctttgtaaatatcaatgaactgataaacctctagacatgttaagtaagtgtatttctatcagctcccttgcataaattttaaaatataaaattaaaaattttaaaatatattttaaaatatatttaaaattttaaaataattttaaaatatattttaaaattattttaaaatatattttaaaaatttcaatagctttaggggtacagtggtttttggttacatggatgaattgtataatggtaaactctgggctttagtgtacccatcacccaaatagtgtacgttgtacccaacaggtgacttttcatccctcacctccctcttccatcctcccctcactctgagtctccagtgtccactctactactctgtagacctctgcatacccatagcttagctccaacttctaagtgagaacatgcagtatttgattttctgttcctgagttaccccacttaggataatggccttcagttccatctatatgctgcagaatacattattttgttcttttttatggctagtgatattccaaggtgtgtctgtgtgcacatcccatttactttatccactcattggctgatgaggacttaggttgattccctatctttgcaattgtgaattgtgctgcaataaacatatgagtatatgtatccttttgtatagaatgacttcctttgtgtagatacctactagtggaattcctggatcgaatggtacatctactagtagttctttgagaaatctccatactgttttccacagaggttgtactaatttacattcccaccaacagcatgtaagcattccctttttaccgcatctacattaacatctattgttttttgacttttttaaaatgaccattctgattggggtaaaatggtatctcactgtggttttatttggtagtttcctgatgatttgtgatgttgaacattttttcccatgtttgttggccatttgcacatattttctttcgagaaatgtgtattcatgttgcttgcccactttttaatggaattatttgaattttttcttgctgatttgagttctttataagattctgggtattagccctttttcagaagtaaagtttgcaaatatttcctcccaaactgtaagttgtctatttactttgttgatgatttcttttgctgtgcagaagcttgtgagtttaattaagccccatttatttatttttgtttttactgtatttgcttttggggacttaagtcacacattctttgcctaggtcaatctccggaagaatttttcataggttttcttctagaattttttatggtttcaggtcttacatttatgtctccaatccatcttgagttaattcttgcatttttaatagtgtttgttttgtgcatatagatgctgttatttggtgcaaataaatatgtttctcatttatgctacacatgatctacttatcacgtttaatatctgaaatctacttagcctcaaattattattgttgcctctgtttactttttgtgtcatttgatgattaagcttttcctcattcttattttttccagtttgctgtgtaattttattctaggtgagattttttgtaaggaacatctagttatatttcctaacccaatttgaaggcttttaaagctttaactgtatacattttatgccagaaataacactggttttgacagctgtttgtgtttttatatcctaagtacaatgcctcatgaccaaaagaagacactaattgtaaggcttagccatcagaatgtctagcaggtatttggaacacatctttctttgaccccaagtttaaaagtgggccattatttgagtgtgataagggaagtatcaaatagaaacctattttcagcctttcatctctcttccgctggtgcatctgttctactcctctggccttgcttcacttgtaaagcagtagcttacaatcattaacctctgcgtaactgccatcaatcaccgaactcttcaggctgaatatctcaaccagaaagtagaaagtcacaactcaggaaagttccacttcaactctggcacgatgcttcacaaatgatcttgatacaccttgcaaaaatgtgtcctcaaaccaacttccattattgaccatgaatattttccagcactcaatcccaaccttccacattctcactgcttccctccctcctgacttccctttcaaattttctcttccctctctcctatccatttccttagccctctcctccttaatcatttccacagctctaattaaactctgaatttccagacatatttatttccattttaactcccagaagtgctatatttctagccattagacaattctatctgaaattaattaccaaaaaccagctataatcctcttccttaaactttctcccagtattttccccagtattatcagactaaaataggagtcctcaatttcttgataatttctatggaattcacacttcctttccctttgttgcctatgttctgctttagtaagagctctgtcacttaacactgtattactgcagtagtctcttaatgagattcccttttccaggctcttctccataagagtctattccaacaaaacttgaaaaaatccagttgctgcgtgtcatttccttacttcagcatctacagttctgttaagtggatcaagcaaacatacgaggtcgactttcaagaagccgcagtgtattcacaggccacctgtccgctgtttacatccagattctatccaccacagattcccagttcctccagtcagcatatcttcattcacttctcttgttactacttttttttctcacattgttttcccattctgaaatgtcccatttccttcatttcccaatcctgtattccttcaaacacatttttccatgaatttttccaaacccagggaggtggaagtggagttaaaggagccttataatcaagaaaacaatgacggcaggtagaagcatagtctatgtaaaggaatggagagtgctaataatggttaatgtgtagcattttcaaccactttaaaatataattatctaaagcaaaatctaattaccattaccatgtattgtggtgtttattaacatatgtgaaagtaaactgtaagaaaataatagcctaaagaatagatggaggaaacagaaatatgctgttgtatgagaattggttatgactcaaggtagactaagttaaacatgtgtactgcaaactctagaaacaacctccaaacaataaaacagacatacaagaagacaatagcagtgataaaatggaaccataaaatattcaacaaatccaaaagaaggcagacaaagagaaaaaaaggaacaaagaaaaaaaaaacaaacagcaagattgtatatttaaacccaagtatgtcattaagtacattaaatgaaaacgggctacccattacattaagtcgtattttctaatgaataacagaaaaacaagaattgactatatgctgtctaaaagaatatccacttaaatataattggcataggttaaaggtataatgatgggaaaagatatattacacaaaagcaaaagaaaggtggagtacttatattaatatcagatgaagtagatgtcaaaacaaatattgctgccatctatacagaagaacatttcctaatgataaggaggtaaagatgagcgcagtgatgtatgcttgcaatcccagctactcaaaagcctgaggcaagaggattgcttgagcccaggagttcaaatccagcctgcacaaaatagcaagaccccatctcttaaaaaaaaaaagaaaaagaaaaaaagatgaggtaaattcaccaagaaaacaatccttaatctaaatatgtatgcaactaacaatgaggcttcaaaacacatgaggcaaaacctaaaagataaagtccacgatcatagttgacgacatcaactatctttttcagaaaccaatagaacaagtaggcagaaaatcagtaagaatatagaagacataaacaatactaccagctgtcttgacctaatgaacactggtagaacaatttatgcaataaaagcagaatacagttgacccttgaacaacatgagattgaattgcatgggcccacgtacacccggattttcttctgcatctgccacctcttgagacagccaagtccaatccctcctcttcctcctcctcctcagcctacttaacatgaagacaacgaggaggaagacctttacgataatccacttccacttcatgaatagtaaatatatttcctcttccttatgattttattaataatatttcccttcctgtagcttactatattataaaaatacagtatataatacaaataacatacaaaatatgtgttaatcaactgttcattaaggcttcgtcaacagtgggctactagtagttaagtttctaggaagtcaaaagttactgggtttttgagcatggtgcccgtaactcccacattgttcaagggtcaatgtatagattctttcaagtgtatatagaacatacagcaacataagccattttctgggccataaaacaaatcttttaaagtgtaaaacaattaaaatcatataaaatatgttctccaaccaaaagagaattaagctaggaatcagtaacagaaagatatctgaaaaatccatatatttggaaattaatcaacacacttacaaataacccttaagaaggaatcacaaggggaattaaaactcttttgaaatgaaaacacagcacatcaaaatgtgcaaagcatgactaacagtccttagagagaaacttaacttagatgataaattccttgaaagacacaaagagcaaaattcatctgagtaacaacagataaccacaacagccctgtaactattaaataaattgaattcacagtgaaaaacttaccaacaaagacaaaactccaggtctagggagagcttcactagtaaatcccaccaaatatttcattaataaataatacaaatcccatacaaacaattcaataaaattaaagagaaaggaggagtacttccccttttgtttttaaaaagcaaacatgatcctgaagtgaaaattatacaaagacattttaggaaaagaagatgacatagtaatatcactcaggatttcaggatgcaaatatccttagaaatacaatgtaccaacgctagcaatatataataacacatcatgaacaagtggtttttttcaacaggaatgcaaggttcactcaactttggaaaatcaatgttaattcaccattttaacagaacataaaagagaaaagccatatgatcattgcagtaagtgcagaaaaagctttaataaaattcaatacccattcatgattttaaaaactctcagtaacctaggactagaacttcctcaatctgataaaggaggcataaaacatctatattataacatcatgtttttataacatattcaaataattctggacttagagaagacttacaaaaatatagtacacatagttaccatatgccctttacccaccttcctctgtatcttgtatagccatagtatgaatatcaaaacaaagaaattaacatcagtgcaatactattaactaaactaccaactttatttcaatttcaccagtttttccaccaatgcccctgcctagtccaggacccaacccaggatcccacatcgcagttaagtcatcatgccactttagtctctccaatctatgagtgttccatcatcattctttgcctatcatgaggctaacacttttaaagttatcaggccaggtatttcgaggaatgtccctccctgtgagttcttcaggtttcctcatgattatactgaggttatgcatcttggaggagagcacttcaaaagtactgtgcccttctcagagcatcttatcatgggttccatgaagtcaacatcttacttactggtgatgttaaccgtgatcacttggttaaaactgtgttttccagatctctccactgtaaagttagtcattttacctttgtaaatgataaatgttcacagggagatatcttgagagtatggaaatatcctctttcctaaacttttgcttactaattttaatattcataggtgaattctgaatgagcaattttcactctggagttctaatggtgatttgattttctactctactcacctcttttacattaattggaattcatctgtaaggaagacatgtccctctcaacactttatttagacaatcaatcacttatttatgcaatatagactcatgattacatatttcatcctttggatcataaactaacactatatttactttattactgaaattgtttcagcttctgctacaggacccttcagcttgggctgttttctaggtcttgccttttttttttaaggctccctccttactttctgacaccacaaaattctccacgctcatctttttttctccccctatactagtgctgaaatcagtcgcgtcctcaaggagccttggttccttttattggagaataatagttagaaacccagatctggctgctagatgtgctcattaacatcatatttaatggtaaaaggtgcttttctccctaagactagaaacaaagtcaggatgctcactcttaccactattcaacattataatgaaggtcttagccaatacagcaaggcaaaagaagaaaggaaatgcatacagattagaaatgaagtaaaactttatttacagaagatatgattgtctgtgcagagaattgtaagtaatctacaaaaaaggttactacaactaattcttgcaagcctgcaggagaaaaggtcaatatgaaaaaaccaactgtatttctatatactggcagtaaaacaaagtgaaaatgaaattttaaatatcatttcccttggaagacatgaaacacacgtaaggataaacctaacaaaatttgtgtaagacttaaacattgaaaattacaaaacattactgtgagaaattaaagaccacctaaataaatggagaaataaattgcattcatggatctgaagactcattgttaagatgtcagctcttcctaaatttatctacagattcaacacaatctcacacaaaatcttagcagactgacagagtgtaaaatttacgtagaaatctatatagacattaatctagataaattcatgctataaaacaccctgctagagaatcttaaaagcttgaaggtagttaaaggatcatatcttttgcatgagtaaatgacctgtccatttccacaaagaaagcaagaagcaaatccaggaccaggatccaactttgttctttcatgttttgatactgtgctctttagagtggtacatcatgctacttgtaattaagattactttcactttttactttgcctagaaagagattcagatctcctcaacagatgccagaatctctagatgtgccatcacctctcgatgtgcagcaataagtagaaaaataaccaataattatgtgataataaattaagaataaatttatcaaaacaataaaaatgtaacaataatccctgatcttaggaatgaattgacttttacaataaattacacattttaaagatataaggactccattaaaatgttttattttataaattatttagtaatttacactaaaacactgaaattttaactgaattcattaaaacagctactaacccccaggctggttctcaaaattaatttcatgttcatctgtgatatgatacaaacccaaatagactcaatcacattttccttttagaaagaaactcaaatttaaaagtgctgctataataaagttgctccttcaagtatatatggggcggcagagaacaccagagcctcgcgggtcacacaggacaccgtgagtaagcctgtagatggcaccaatccacgaccaatctattgtttacagaaacagtcattttgggttgtgcttctttatgcaagatatttaacacctttgctcaaattaagtggcacccattaaaaaaaaataattataacaacttgaacgaatttatctacatgtcatcagaaggtgtttaggcagctcctcctccctgccagagctgctggctcccctaattccattcccacatggtagctcctggctgtcttactatcacctttacactgggcatgtctaacccagtggagctgagataggacaggccttgcttccttactggtatactggttgggctctcagagctttctccaggtggggccaaactcttattcaacatgaatagctgaacactgagataaggaaacgttgtagcaaatcttatttcctcacaggactaagaaggtccatattttggcccttccttgaatttacagggccacattggtacctcaaccattgtctcttaaagaaatggttcttttcctcttctttttttttggagtaagtcctcctagaagagggtgtctagaaaggatgatatttagttgtagcttattattagctatttattaaaaataaaaccatgcatgatttctgggagagacagcaagcccttcttccttccaggttcttttgtagtgtactgacacgatgaaaacagtacacagctcattagaggcattcctatatatgcatgcaactcataaggaacatcctcagtgatactaagtggatataaaattgtctgtaagaagtgaataaacatttaggaatgctcaagtgcttctcataaaggttgtgaaggattcagtacttaacatggtactttatacatagtagaaactcaagatatgtgagttgaatcgagtagaggtgtctaatatgatgcacctattttaaattcctagttacaagaaacagaaaatcaccatactcccagtaaccaataacataatacagacatgaagtgcttgtgttacttcctcctaactcatctaattcatatgacataattctatgtttaccttaaggcttaacagagaagaacacttggcacataacagaccccaaataaatgttgttgactaataaatgtttcagagaaaaatatgaaatgttggaataaactgaaatggatgaactaaaaataattacagaaaaattcggagtagattattgaatgaaaaacatttcatagtaaacattttatacaagcatctgaaaatcaaagtatcaaaatccctgtctgtactaacaatatctgaggtagtgggggaaaaaaaaaaaaaaaaaaagcagggggagggggggacagacataataatttcctgctcctgaacttaagcaaaaattgcagtactaagaacaagaagggtgggtgcagtggttcacgtctgtaatccagcactttgggaggccaaggagagaggattgtttgagcccaggaattcagtaccatactgggaaacatggcaaaacctacaaaaagtaccaaaaacgtaggcaggtatggtggctcatgcctgcagtccgagctacttggtaggctgaggtgagaggatacttgagcctggggaggtagaggctgctgagctgtgatcgtgccgtgccactgcactccagcctggccaacagagaccttgcctcaaaaaataaataaataaatgaataaaaagtaataagcagatcacaataaaactaaacatatgtaattagtagtggttttttgttttttgttttttttttttttaagagattgggtctcactctgtcatccaggctggagtacagtggtgtaatcacagctcactgcagcctcaacctcctgtgctcaagcaattctcctgcctgccttagcagccttcttaggagtgcgccaccacgcccagttgattttttttttttcttgtagagatggggtctcactgtgttgcccatgctggtctcaaaactcctggcctcaagtgatcctcccacctcagcctcccaaagtgctgggattacaggcatgagccaccatgcctggcctagtagtattaattttgtgggcaataaagttctgtttcaaatgacagagaagtccaaagtaagacactgtgtttactaccttcattaaatattaaaaacaaatttctttaaatttcttttaaaacaaggatttgtataaatgaatctgaagtgttcactttaaaattaaagacataagggcaaattaaaaaattttaactagttttcttaaagaaaaattaacacttggtatctttattaaaattaaagaaataatgagaggcaaacaaattattatgggaaaaaaatagaaaaattctgtgatcatgttgagcaaaatctcaagaggcatttggggagtcaaaatcatgagtaaaattttgtgcacagaagttcaataatcacttaaatgtcggtaaaatggaaagtatcattacatcattaacttttattcacttaaaatatttttgctataaattcattttagcagtgcagccaaaatatatacacactatgccataaagaaatcttacctttttatcatatacatcttgccagtttactccagagaagaaactgtgtctcataatttcttttgcatcatctggtcctccaccaaggctatgagaacagaaataaaattaagtaagtataaaacatttacataagctcaaagcataacaaaaaatattttgtgaaagtgtaattttctgtgtaataaacagttcttgggataaatagctctaaaagtaaaaagcttttgctataagatctatttttcctaatatgcttgtaagaactagcttcagaacagtatggtatttggaaaagagcagaggctttagagatagatctggaagaggcaatcatgtctggcacttatgagatgtgtgacaacagaaaagaggcttaacctcagttttctcatctgcagagtggggaatgataacgtttgctggtgggtcactgcaagggttagaaacaacataggaatatggtttggctgtgtctccacccaaatctcatcttgaactgtagctcccataatccccatgtgtcatgggaggtaccaggtgggaggtaactgaatcatgggggcaggtttttcccatgctgttctcatgatagtcaataagtctcatgagatctgatggttttataaagggcgattcccctgcacatgcccttgcctgctgccctgtaagatgtgcctctgctcctccttcaccttctgccatgattgtgaggcctccccagccatgtggaactgtaagtccaataaacccctttttctttataaattatgcggtctcaggtatttcttcatagcagaatgaaaatggactaataataggtaaagaaatttcagtgttttctggcttattcagtttaatatagtatatattactaagcataaaagaactaaaagtgagaaataggaagaacaggaggaaaagaggggaaaagaacaaggaaaggaagataaaataaacctatttaaatctgaattttatatagtaggctttatttggacttgttcattattagaaatgatatgtgctggtaagtgcttaacaaccagctctctgtgagcaatcatgcatttatacaaatataattttttttcttttttttttcaaaggcacagtagataccagatgctcagagcagagcagccatggagctgctgggaccaaaccttgcctgacctagccaccaccacaccccagacatataaatttaaattttactgatataaagaatgcaaaacacaaaatttacaaagatcataaaacatacaatgttgtgtattgtaaattagtcacctgattctcacagaaaacttgttaatttctgctgtacgccaaagccactaatggatgaaacttacgattagttccaacatgaatattggttgacatttttgtttatgttaaagtcaaagctgaaagtgatacaatggagacttcagaacttcacttgtcagttatgtgagtgatttctttgctaaatgtttagtaactttgggatggtggaagaagattcattttttggtgctatttacaatgtaatgaatctgcattattaatattttctcttaagtctaaacagtcaacaaaacagtaagtgcagccccaactcatagtatttgccaattctggcggtataaattcttccactgtggccagtttcgagctaccaataagatgtcactgaacatgtaggcaggaagagatgcatagtagcaaaccattatatattatgtccaaacagatacagcagacataactaatctcaaaaatacagataacagtgaaacataacaaattaaggagtaatgactttttagtatttatgacctttgattttcctattattagtaaatttatataatttttagtaatgactataatatacaaccagctcataaaattggtgaaaatttaacagttggttcttgagagctggtatatgctaactccaaaacaccactgggttggaagaaaaccaaatacgtcatagaaaacaaatacagatgctcctaaacttaatgatgggttatgtctagataagcccacatttcaacttaagatggttttatctggatgcaattccatcattagttgaggagcatactaaatacgcatcagtttcgcaccatcataaagtcaaaaaattgtcaagccatcgtaggtcagaaatcatttataattatataattctaatgaattctggttattagatctaagaaacacatgactgggaaggacctagtatcctttgacacacaattaaaatggaaaacagtcaactgatacctgaatatctttagtgatgataaataattcccaccagctgggtctccaactcccagatccttatagaattctctaaatgaactataccccagagatggcacttttaggtttgatcataatagtgctgttcgatgtttgcatttggaattttcagactggtagttctgtgttcagtgagagctcagcatttcagaccctgccctctttttcattctatttcagttgtgtaggtttctttcccaggagactgcaaactcctttgaaggcaagatcagtgctggattatccaaaaggcattctaagcttgtgcttggggaaccagagaagcaaaagcaccaaaacacgtttctgaaaagcatttaatattttcaagcatgcgtcaacatagtctgcatgagaaacatcaaagctccatggcattttcttacacttatgttgtagtttatttcaatactgttttcatttgaattgtacttgagatgggagttggagtggagaatcataatcattttgtaaataaaatgttttaatccagctttagttatccatttttgtaactcctcaagttttctagcaatactttggttttgaacatagccagcatttattctatatttatcaaatacatataaaactaaaatatcagctatgaatactatgcaaagtctgagaatacaatcagacttccattttagaagctaggagaaattctttaacacacttcttcaatgtgtgaaactgtcaaaaatttcagtgtcaatgactctctaatatacaatttaagacttcaaaaataataacaaaatatgctttgaagtaagatatttatgtctagaatactaaactccagtatcagaatgccagactaaatcctcagctactacaaattcctttactattaggaacatcacagaattcacattttcctaatgttactgaatacatgaggtcatgcttttcctatcaactccgcataggaagataaaggaggggctaacagaatgaacagaaaggatggagactaagaaataaaagcaaaatgatagttgacccttggatagaactaacagcaattcaataagaaataccagaaaaattccagtagtatttaaaatagctgcgtagaaaaaatgaagaggtgtattataatgctatcattacttatgtttccaaaggcttttcaaggtccttgttagctttcttttctttctccccctgaaactgaggttccctaagattctgtcctaggccctcttctccttatccactacccttgccactactgccttggctctagctacctcctagatatagttatggttcccaatccatgtagtcagttactgtgtttcttttaagcattcattctattatttccagctgctcacttgacatttccatcttggttttatatagaaacttcagactcagtgtacccaaagttattatcaacatctagccccatcaagcctccttggtttgcataccctgtctgttaatcaccctagctggaaacctcagagggattcctaactcctcctacttcctcatagtttctagttaatcataacctctatcacttgtgtactactgcttcaggaaggaatccatctattatctgaacaattccataaatattctttttaaaaaaaagacagggactcactctattgcccaggctggagtgcaatggtgtcaccttgggtcactgcagtctcgacctcctgggctccagcgattctcccacctcagcctcccaagtagctgggactacagcatgtgccaccatacccagcattttatttttttttagtagagatgaatcttgctatgtgcccaggttggtcttgaactcccgacctcaagtgaccttcttgcctcggcctcccaaagtgcggggattacaggtgtgagccactgtgcctggccccataaacacttttaactgctctgcctgcccctggatcctcactcatctaatctgtccatgacaaagctgccagagttaccttttcatgacacaaatctgattatactatcccttgctttaaacacttaagcagtatctcaccctcttctgaatgaagattaaatattttctaagaaacctaagatccttataatctaatatatcagcttcatttcccagtgttacccaactcatattctacactctagtcactgaacttctcaaatgccatgttcttttgcaatcctagctatactctacatgtaaatttctgtgcttgagtgccaatgcaaattcaaactcctttctgatccagctcaagtcccccaatcccctagacaaagccaataatttcaacagtactttgtatgtagtttgacctgagcatctgtgagtatatgttttgtgccccaaattattctatgaacatctagagcagagactggttcatctcactcatccttgtattctctgtattttgatgcagcagtggaggggcttgacacatctattataaaagaaattattagatcattgaaaatactgcatcttctcattagatcaatatcaacctcctggtgaacaaacagttaggaattgttctattaatacatactaggcggttaacattctaagaatttgcctcacattcattcaatagttcctaagtaccgactatgtgctattcatggagtgggctgacaaataaaaaaaaatgaatgagacatacacatgaaaaccacaagtacattttgttctactagccacttatataaagagggccacaaagtaaagggtggtcaaagttgcctgcaggaataagaaaacgatgagataaatattcactgcctcgaataccaagccaaatattagaccaaaaaatgaaatagataaaagtcggctggacacggtggctcatgcctgtaatcccagcactttggaaagccgaggggggtggatcacgaggtcaggagatggagaccatcctggccaacatggtgaaaccccatctctactaaaataccaaaaaaaaaaaaaaaaaaaaaaagccaggtgtggtggcaggcgcctgtagtcccagctactcaggaggctgaggcaggggaattgcttgaacccaggaggcggaggttgcagtgggccgagattgcgccactgcactccagcccagacaacagagcgagactccctctcaaaaaaaaaaaaaaaaaaaaaaaaaaaagataaaagtcaccactctgtttaaagttacctatcatcgggtgctgctccttacttaattgtaaaagaacgctatcaaacggaacacatttcaaaacttaaactgagaaactgctgcattgtaaataagatacataagaaataccaaataggcaccaagaaacttgacttctactcttggtctgcatgaatgttctgagagaccttgaagaaatcacctaaccctctctgggcctttgttttcaactcaatgaaatggaaataagaatagtatctcccctatccacccaacaaggctcctgaaaaagcaagggaattaatagctgtgaaagtgctctgaagaagaaaacaaaatcactttacacatataaataatatctgcagctaggattacaaaatgtttcttgaatgagtcttcacaaagcagaaagacaatatctcttttattatgtttgcttatttctgctgaagataaagccatgttccttacaaggttaaaagctagaagaatacaatgaaaaccatttctcagatagacttaaaaatccaactttttgggattcactcattaacccactcatatatatataatatatatatatatgagcatcaaccatacgtaaaacattttcataaaactctatgtgaggtattataaaatattcaacaatatgtgaaatcatctatgcttcaaatgagtagactcagagaaatactgatatgcacagatacctagatgggaaggcagatatatccatatacaaacacacatattaagaaacattttaatattaatagtcatttcacatatgatttatgaatttataaatatgaatgaatgtataaacatgaataaaaatactgtagctcattgaacaaagcagcaagagccatagagttcttcaattcatagctgtagctacaaaaacagaaattaaaagtgtgtacaattattttttgccatcaactctttcagctatgcatagaaaagattattttcaaatgacaaaaaagcagttagaggccgggtgcggtggctcacgactgtaatcccagcactttgggaggccgaagcaggcggatcacttgaggtcgggagttcaagactagcctggccaacttggcaaaaccccgtctctactaaaaacacaaaaattagacaggcgtggtggaggtgcctgtagtcccagccactcgggaggctgaggcaggaaaatcacctgaacctgggaagcagaggttgcagtgagtcaagatcgcgccactgcactccagcctgggtggcagagtgagactctgtctcaaaaaaaaaaaaaaaaaaaaaaaaaaatgcaattagatatgttaacacaggttgcgggtgggaggagagtattgaaaaataggtctattccttttataagaaatacaaaggcccagagactgaaagaaagaaaagtgattcttctatccccacaagatcaagtaacagagcaattaagaaattttcactcataatatggataatgaaactctcaaaatccttatttggtaaatctgcataaaatttccaagttaggaaagagttgagaaaaatttttaaatgttctatattatgcagttaaaaataagtcaggatctcagtgggaagatgtctacaccaaatacattgcttcttggagttagttatatttgaattaatttccatatctcaatttttaaccacattcatcagtaattcactaagcgttatttgaggcttaccgtttatttggatcctttatcaagagccctgaaagcaatgattttgcatctgaagagagtgttcgaggaaatttaatgtcttccattaatattaattcaaaaagtttctcatggtcctggttgtagaaaggtaacctcccacacatcatttcatacatgacaacccctaggccccaccagtctactgctcggccatagtcattatcttctaacacctaaaagtgaaatcagtaaaaagattaattattacatgttaacttttaaagcattattcataaaacataagatttttacataaaaatgaatcttaactttcaaagcctaggtagtctgagatcttgacatttaaactgtgaagcatcctacaaaaaatacaaatcacatcaaatatgtgaaatattcaatatatatccacaaatggccagtgtacaaaaaaaggggcaggtcgtacaaaaaaaaaaaaatcccaagtacatgaatatacataaggatcaaatgaaaaacgttagctagcatatttacatattttttcttaggcctactgactttttcattctggttccacccatgtggacttcaagtaacaactcagagctagggtgtgctgattatagagcacataaagtgcactgtacattcttgccttaagaagaactaagtaatacaaattaaacagtgaaagacagtagtaaacaaaggcaatgtaatggagaagtctacagggcaagacaaccattaaaataactttgaaaaacctttggatgcccctgtatgtttcaactctttctggaactatttaagagacaaagtgaatataaaagcttatggtacgagctgtaataaactttgatagccacagctttatacctcacaacaaaaattcctgttacagcaaaaaaaatggacttaatatctgtgtggtatatgtccttaaatttttcccaaaatatattacacgtaaaataaatttagttagaaatgatacaaaagtatccgtttgcctatgctggagcaacctgttcaaatggtaacatggtaacctaccatttgccccaggaaaaatttggttttatctttttatcagatttgttcttcatccaatggaatattcctcatctatatgcaactttgaatattttattttaaaactatatttgataatcttaaagcttattttatttgatcctctcagctttggaaaaccagatggggaaaaccaaatatatgaatttatcaatttaaaaacacttacaaccgattacaaaggagaacatttgataaggacaaagcagtacttgtgttccaaactttcttgcttcgaattaaatattttctggaagattactcctacatgacttttatttaaaatttaccaataatctcacagaattacaggtgatatttttgacagttacattatgattacctaaaaatactatgaaaggcactttggtagggtatttaaagacaaaggatataatttataagaaaaaatatgttacttaaaagatctattcaataagcatttctattatgaaaagatttttaattcaattatatcaatgtttgttttacggctaaaaaactgaaaacttcactggtaagatatgaacacatgtttagatcctatgcttttctagaaatgttttgtaaatcacaaactaacaaaaaaacattttctggaagaacaacaaattctagttttcatcatcagcgcaaagaatgtcatatttttacttgtttgaaatgagtaatttgagaacaaatagaaaacaaaaaataacctaaaaaagcagaagaaattctacttcatatttacgttaaaggaaatgctgcatgtattattttaaaataccactgacttttgatgattcaaggatctcgctcatggccaattagtacaatgcactgttggtgggcctttatctaattgacacaagattttaactaataacaaccaaaaatttatatctaagtaacctttaactacattcctacaacaccaacacaacagtggcatatacgaaaaggagccaaatgtggtttttaacctcttttttttttcataaaaccataaaaagcataaaagctggattaactgcctcccgaacccacatttcaccagccgggttctcatccccagctggcaaaactggcaatcctttattttttttaaatacctggtttgcagccagaagggaaagtgagtacataaaaaaggggggttttatttttgaagagaagtaagcaactgaaaaataaaactgcattgtaaaaaaatctgtttgataaaataaaatacattttatttagctttgtaaaatgaatatcgattcttaaaataagtgattttgcctctgaacatacgtgccttaattgatctacagatacataatgctataattagaactgtttgccgtattactttgtattgaacaaaactgatgtaacgtattgtcttcctgacatgtaaacttaagcaatgctgagaagaaaacaccctaacaactaaaatccctctttacctaagagacttcactatcaattagaaagatttttgtccaaatcctatctccaaacagctataagatgaaacatacataaataatgattacagtatcctacatgtggatacatatgttcccactattaaaacaatatcctttctctttcctgaatctaaattatttcaaaacacaatactttcaaatactctggaaatcccacagccaaattaaccaattcgaatccaataacctctttcacattattttaagaagacaatttttctccctctactcaaagcacttattattctataaatacataacatataaaatttacatttttttaacttaaggattgcaaattctttctggctacctctgatcatttttttctagctaaaaggctaatttatttcatggttattgtgagggctggctgaaaggtatgataaacagtggtataatggacaggtacaacaatggtagagcatatttcaacttcattaaaaggttaatttctcatataatttggatataaatgcagatcaaaatatgctcctgaaaaaatccagtgaaagatttatcttgaagaaataacttctgtctcctttccataaaaccaacattactgacttgtaaatgaaacccaaactttaaataggaaagcagacatttggtatttcctctacccctacagtcctttgtaaccacagatgtagttgtacattatacctacctttaacacaaatgcccaaacagagatgaaagaggagatttggaacatcaaaaaaatgtaattgttaaaaaatgatgagaggtcacatcaaatgaaaacttaaacagagcacaaagtctagaaaacaaggctgtatttctaataggagccagaaactgctttactttatgatacgataaaacctaagactcaaggaggttacagcagatacaaattaacattaaatatcctggaaatatttgatcaatatttgatgaagacacttacatttataaaacagccaggtgagttaaaacacattagtttttgaattgttattaatttcaaagaatgatattgaatgagaaactatatatttttaaatgatactaccaattcaagttactaatgtaaatatttatttggctaatgggctttttcaaaacaaaaaaaaaactattcattacaatatttgtttaccaggaggatttactaggaggttaaagggacccctctctcagcttgcccaccaggccacacaatgcacccaaggcaagcaattataaggaggctatgtatgccctggagtggcttactgctcaatcaataatcctgacagaacagatgggggaaaaaattaaacatctaaacaaactgtctgcacacctatgctgtgaaagtaaactgcgaacttggatgaaccaatttaccactaattcaaaaaaaaagttttttctggtagccttacatttcaggtaactgatagatgtgtgttttatacctaaacatacatctgtatcatttatcatttatgggagcccttcagatattcttaacatcacaggtatgggctaagaaaaaaagacctataaatcttctcattcagattttaaagtaaactgcagcttcaggaaaagtatccatttcaatacataagattataaattctacagttgcttggtattttcttcataaatatatattttataactatttctcaactgctttaatagttcttaagtgacagcaactgtcaatgccatttgctatgaattagaatgctgtacgctttatggccacctctcctagcacacacaaatacttgtatacagttaacatcgtactttcaaaagcaaactctggctagcacaggaaaaatcctttgacaagagaaaggctaaatggatacaataatgatgattagatcatacttacacatatcttccaagaaatttctatacttcttttttattctgaagcaatagacattatgggattccaagaaactgagccttcataacccaagtaacaatagccattgtaaaatactataggtaatcaccagtgtttccagttagggttagttttgtatatgttctcatggtacagagaatttaaaattaaacttcatgcttaaactagaatcacaccgaagtactgaatgcaaatattctgttaaagccaaaagaccatataacattgaaaagaagttagggcgaaaaatagctactttaagaactgacagacctctaagtaagtaaaagatgccacttataaacattgagaggcgttaattccattttagttcatatttaaacaatgtccaattatgagataaaatggaatggcttttaatattacccagaaaatcatataaaatagcaacatactatagaaagaaattaaatatattcaactaaatagtaagccaactcatatgagagttagaagttcttaaacatgaattctaactatagagcagacagcttctatctgaactcatccctctactcctttaatgttccctttaatcatggtgatgagaccttttctgaattcccaggaagatgaaggttttcaaaattaccccaggtggagagatatcatatgaattatcaataagtaaataaaatgttagggttgtccacaattttagaaaggctactaaaacaactctttcttttcacaaaaagcatagagattctaagactagttttacaatctgctggaatatagtaggactttgtgcaaagactaatcagaatgtaactacatgtgctactatttttacctacagattaaatgtgcaaacatatgtaactttagcctcattcatttctcttcagatctcctaaaaacaacattggcagcacccacaaaatgacatattttacatttattctttgttggatttaaaataaagaaaattctgtttaatacatttcaagcaagttagcttctaactatttcccacacctacaacactagtccatgccctggcactgcctttactaccttttgtggaagttaatatatatctttggtttttaatttatatagaaattaatctccatgtgtactatgagctaacacaatgactttgagcaaatctttgtatcaaaatagttgtcaaaatattctcatctatttcagctattttaaaaatgttacattatatgcaagatattaaagatagtaggtttcaaagaaaaaatcaggaaaattttggcaagcaaaacattttctaagaatggggttctaaaaaactaaaaagaatgcatcaaatactgcacttcagccactggaaaaacaaatcattttacatttagatgaaataaaattagatgcatttttttctcaatagcaaccacagctagatatatttcccaacaatcaagtcattttttgcaatctttgttagttctaacttgattatcaaataatttttatttttacactattacagaagtgcatttctctaggtttccaaaaccaccttattcaaccttccccatctgtcaccatctgcctctttttagcatgtactttttgtgtgatcacataagcatgtgaaaaataactaacattcagatgattatctgctggtacatttgaggactgggcataataaaagtgaactgccaaaacgcacttaacacttttaattttgttgggtcttgcatgtaagctacatttgattttcaaactgttttacagttggaaagtggatcaggtactgctaactcaagagcaaagctgagactctaaataattagcactgcataaaatggtttggattcaataggagccaaatcaaataataaaatttagcagtaagagtttatatgtgatttctaatttcttttataatttctaggtgtgaaaatacagcacagattataaaaacaaaatcccctcaagatatcatatggtccataatttactataagtttatttccttcgaatgtacaaaagagcaaaagtacattcatttaaaactatacatacaaatgcagttttcaagatgtagcacactaaatgcacagtgcatatgccagctagaactgaaccgctgtaacctgttaaaaacacaaaacaaaacaaagctagccttttctacattagcagtattgttaaatgcttcccaagttggaaaactgcattgtaagctgcattcttcatcaaaagagataagagaacaaataccttaaaaatattcttttttcaacaaatggcatatttatactgtaagttttatgtttttctaatttgccataagaaacaaattaagttcacttaaaactcaagtttattttaaaacctgccatgtatctgacattggacatttaataaactggctttaaactgatttctaacactctttgtgaagtatcttcaaaatacccttcacctgtctttataccagattaaaacaacgtaaaaggcgaaggaacactattgctagatgaagtataggttgcagcaagattcctacataatgtgtaaacaaatcttctgtaaagacagaggggaaaatgttgacagtgagtcattcacaagagaagcagtagtcaagaatgtattacagatctgatacacaactactacttctagtactgtcacgaaaagcccagcattaataatggtaatgtactagaaatttcaaggtccaaaaaaagtgcgagacaccatctgaggtaaaaggaagaggctggcttcagctcctgccaatcgctccctaacactgaccatgtaaatctgatcacagtatcgccttgctctcaattcacaagtaattttccctagcccacaggatcaaatctaaaactgttacatttcaatccctatctatgtgtccagcctcctctcttcctgcttccccttttccactgccggaccctccctgcaggcttaagcacttttccttttccttccactccactgtatggaactagtaaagcagttattttcttgcacagtaataactgttttccatgtcttatcacctcagtgaacagcaagccacttgagggcaaaaacatcttctaccatcgttgtattcccagtacctaatgtaatgcctgatacttaatattcaataaataattctttgatgaatgaatgagtgtccctcagtaaaatggtccacgctgaagaccagaataaaggaattaaattcttatttttttaagggtaaacacagtcaaagtttaaaaatgcaatatgtgacacaacatttaaaatataaaagttacaatttcgtaagttgtttcaagatttctcatactcaaataataacaacaataatcactcttccctataaaaacatggtgtccagatttgaattatgaatcaatgtgtatccaccaaggatgggtatacaaactgtttttaaagaccagacttttgaagtattaaaaaaggtatacagaaatgttttcttgtctttaaagagaaactgataattttgtggcaactataaactttccattcagaaacaagtggactcttcttgcattagattcttaatttgttcttcagttgatgacactgcatatgaaataatatatttgtttctcagatcatctgcttcttaaatgagatgtattcatcttcttcagaaataatttaccctaattgtgacacaattaattttgttattctaaatatggcatatcttcttccatagcaaatttatagcaggggtaactgaactccagagaaacaaataattttttgtgacatttataaaaacaattctattctagaaaatattttatttgaataaacaagaaacagtgttactaaagttttacctaattaaaccacaaaaatagagaattctaaactacaaatttttaaagagagaaaattatatttttggcaagaaaataatagtatgaaatttattgtattttaaatagtagcacttatttacaataacttaacattgttgaaatgtaaatgtaatccctagttgaaaagaagtattagaataatagaccagcatgagttactttatgtttaaggaatgctagtatcattggggatttattttacttcctaatttcttttgattaccttttcctgttgggcatttacaaagcattcatttaaaaattacgattatttatatttgtaagtggtcttcaaattaggattttttgaggccaggacgtatgtagtttaaaaagtaaaagtgggctttatagtcagacacactaattagaatcttcattacacttctaccacctcttagctgtgtacagataacatttaaatattctgatcttatgatccctcacctttaaaaaattgcatttgctatctatcatcaaagattattccaaatgttaaatgaaataatagctgtaatgcacttacacagcaggtggcacatagtagatgctcattaaatagttaccctcacacatcaaatattaacacctccctatttgcctatagccacaataactgtattggagtttgaggggaaatggagcaccagctgctctctttggaaagctcttcccttttacctttgcaacaggtaccatcactttccatcaaccatcactttcgctgaacatagtatctgtgaaagatgttatttttcaaagatggctgtggcagtatctcccatctcacatgctcttctgtaatgtaaaggtgtggtctctgtctctaccactttaacctgtgcaggcttacaactgcttcagggagtaagggtatgacagaaatgatgttgtgtgacttctgaaaataggccataaaaggagatgcataaacaaatgttcatagcagcagcattattcatagtagccaaaaaatggatgcaacccaatgtacatcagctgctgaacaaataaacaaaatgtggtatatccatataatggaatattatccagccataaaaaggaatgaaataagtataacatgctaaaacagggaggaacactgaattttatgctaagtgaaagaagccagtcacagaagactccatactgtatgattccatttgtatgaactgtctacaataggtaaatctataaagacaaaaagcagatcagtggttgcctgtggcggaaggaagaatgaggagctaacgggtatggggtttcttgctggagtgatgaaaatattctggaattggacagcgatgatagttgtacaactctgtgaacatattaaaaatcaccaaagtgtgtattttaaaagagtaagttttatggcatatgaattgtactccaattataaaaatatctgtgaaatcaagtttttaaaaagttaatagtcttgatggtttactaggtggaaacaaaggcaccatgcagcttctaatgtgttccctaggacatttgcttttagggctcagagccaaagaagtctgactgcattgaaactgtcattatgaggaagtccagactcatggagagaagggctacatgtaagtgttcctgccaacagcccaaataaggtaccagtggacaggcagcagaactgtcggacatgtgagtgaagatgcttcctgatgactctagtctccagccatagaatcatgctctcactgtaaagtctttcaagctgagacctcatacatagtggagaataaactagctatccttgctgtgcccatttgcattcctgattcagaaaatccattattttatataaaatggttgttttccactgctaagtattagggtggtttgttacacagcattagtaactggaacaccatctacaacagccacaccacacccttacatttaatcttgcttttttgtttgtttgtttatgaaacttaagacattatgttatttatttatttttattctgtctccctccactgaaagttaagttccctgagactaggatccttttctgtgttgtgcctgtaaccacatcatccagaaaagtacctgatatacagcagatacacaataaatatttgttgaataaacaaattaataaattattgtggaacccttagcacagggaagttaccagtttggagcttcctctgacataaattccaaaatgtagctactgtcatttcaataattttcccaataaaataattttaaataaacccacaatactataaattaaaaaccactgttgtttctaaggaaagtccaagatggtttataaatataaatactcttgctgaaatcaattattctattttaataaatgaatcaaaatgggtatagccaagataaaatggatatggccaagaaataaaaattgatttaactgactatagctagtacctttgtgcttatagtttataaaatttaatttcagtatattcttgatcctacaataccccattataacaaattaagagccaaaaaattttgattcaggttgaaatatagataaaagtagtagatactacagttaacttttaatgcttaaatggtttactttgcaaatcattatgtcaatgttactttcctattaatggaaccgaagcctacctctggtgccagatattctggagtgccacagaatgtcttcatggtggctgcatctgtgatcccttctttgcaaagtccaaaatctgtaatttttatgtggccatctttgtccagcattagattctccaactgtgtattaagaaaaatgacataatttgttctatagtcttcaacaacatgaaaataccattttaaaaaactactgaatgctgagtaaggtattttggaaacaggacatagttgtagctaatagaacgctcagtacttacaaactctgttgcttcacgtgtaaaaagaaacatgttttatcaaatacttcacgatgataaaattatctatttttaaaccgatgggaataagtgatatagctttaagagccattattttgtaagttctgaaattaaagcctaatcaacttttcaaagcaaacatcaatcctctttttttaaaaaagaaaatgtgatctaaacaatcccaaagagatgagcatcttcttctagatatatacagatggtttcaacaatttctcctgggaatctattgctattataaaatattcacttacagaaatgttttttggtggtgcttgtaaatcaaacctaaatcttattttgtaaggtaaggcgatatcctcttttgcagttctttgtaataaagaaataccaacccttttaaatataaaaagaaaaagaatatcaaagtcaaacattcaacagttaataaaaatatatagcataaatgttataaagttggaccctctttgaacccattaattcaaaacaccaaagaaaatcttaaagatttaaccaagtaacaggatcatgtgcctcaagcggaaaattatgaaatgtaagagaggaggaatttgtgcaaagccaacacaattagaaataacaatgtaaccagccagttcccctcgagctaatttgaacctaagattatgattatcatcaaacaaagatacagatgagttctgagttatgatcatacagccttatgtattcagggcccataaaactttgcctagtcatgtagacacaacctaaaggtatttcttctgtcatactgaaaaaatatacaaaatgtgaaaagtatattaacaggataaatgatagttaacttttatttgaggagtagattcttattctactccttaatgtgatgacatttgaaagaatgtacctggactctgaagttaatatcaaatttaaaacagatctccactttagaacataaacatatcagtcatataaaatatgttattatactctctgccatattgtcaaatgtcttataaaccagacactaaatacagttaggcaagttgtgttcactgaagcaaagttcagaacagacaaaagtccttttttatagtacttcaatgtgccatctaactaaaccaaatgcttgatatacatttcatgtatagcatgtctcacagaggtaagtctggcttcaatttttttctacagaaagctgaatgaacacataaaatatactgctgaacctttaaaaaaaaatttctgttttgagacagagtctcactctgccacccaaactggagtgcagtggtgcaatcacagctcaccacaacctctgcctcagcagctcaagccacctcagcctcctgaatggctgggaacacgggcacgtgccaccatgcctggctaatttcttaatttttttatagtgacaaggtctcactttgctgcccaagttggtcttgacctgctgggttcaagcaatccacccacctcagcctctcaaagttctgggattacaggcatgagccaccatgccccaccaaattaaaattttttattttatccaaactcagttatcttgtatattcctgtttctctaccagccagaacctagaaaccaaacccaatctgcacaaatgacaataagtcttgtatattgaaaccaatcagaaacatcaagagtcttcaactgtcctattttctctttctgccttggtctgtctcttctcagcctctggtttctctcttttttccacctctttcaaacaacctctcttcttcctccctcccactttgccataatgagaaacgttaagtatatactaaagcttctgttgttttactgaataaaaatgtatatgcccttttattaatttttaaaaatatgctttataaatatataaaatgctgaagatctttagtgaatactcttttactaatataatacattaacaattcttataaaagttccaaataatacaaaatattgaacaaaatgtgaatgtactttttacaccattccattcccatctagtttggtgtgtaatgtgccaatactcctcacatgctttgtatgcatgggaaagtcttcatggaaacatgacagacaggatgcactatttctccacgttttgacaaagctatttttgaagtggctggatacagaaaaaccaaaatgtataaacactgctttttaatacctagctccgtgtgtgtgtacgtgtgtgtaaaattctgacttgcatctaattctgtaacctcgtatctcatctctgagcctcagatcatggttgtgagaagaagaatgaaatgagatgcaaggataggtttgggtaaggaataggctgagggtgaccaactcccagtttgcccagaactgaggggtttcaaagaatgcaggacgtgtagtgctacaactgggcagtcctgggcaaaccaagacagctggttaccctacttgttttataaattagcttttaaaaaaattacaatgatatagtaagaaataagataagcctaagggatgactgagagagatggggtaagggtcatggccatggggactggtagcatactgcctgggaggcagtagagagcaaaatggataagactatgggttcaagtcagagggttcatattaaaatttgagctttatcccttattcactgtgtgaccttgggcatattattaatttctacgtgcttcaatttcatctataaaacaaaagtaaataacagtaacaatccaatgtgacagttttgagaaatgagatgctaaatgcaaacttaacataccataagaattgaataaatgaactcatcttttcttaaaacatgaagagtttaatggcttatttgtaaattgtcatgatgtgggctcttctaaaaaacactgtattttaaagaaaagaacaaagttcaagagtggaaccccataaaacatttctgttggctcaatgactgcattaaaaatacttttcaatatgcaataatttattttaagtaacaaaacacaggctaggcacagtggctcatgcctgtaatcccaacaatttgagaggctgaggcaggcagatcgcttgagctcaggagttcaagaccagcctgggcaacatggtgaaaccctgtctctaccaataatacaaaagattagctgtgcgtggtggtatgcgcttgtggtgccagctactctggaggctgaagcgggagagttacttgagcccgaggtgtgtggggaggttgtaatatgcagagatggtgccactgcactccagcctgggtgacagagtgaaatcctgtctcaaaaaaacaaaacacaaatattttataattttcttatttttgagacagggtctcgctctgttgcctaggctggagtacagtggcacaatcacagctcactgcagcctcaacctcccaggctcaactgatcctcccacctcagcctcctaagtacacaggcgcacaccactaccacgccctgctagtttttgtttgtttcttcctttttttttttttttttttttttaagagatggtattttgccatgttgcccaggctggtcccgaactcctgagttcaaacagtcctcccacctctgcctcccaaagtgctgggattacaagtttgagctactgtgcccagcctcataatttcccagttattttgaagtagtgtccacattcttctatcaattactttgtcttctctcaccatcctaaaacgttgttttgctgagcatgaatgactaaaacttgtccaccaaaatattagcttaaaaaataatatccccaaatctaatcttgtataaagataaatcaggagataataaaatgtacagttctgttatacaatacatgataattttactcaggatgcattaacagagtttctgtaaaatacaaggaccattagtagggtgattcgtaaacctgcagaatgcacagaaacacctgtaagtctttccaaagcatatcaatggcctagatatatcagtaacatctggaaatcactgtcttggttcatttaacactaacataatgtaagtagtatttacattatttacagtagtcatacatttttaggaatctttctactgcgtaaaggaggaagaaaaatatttacaaatgatctttctttagtcttctcttctagatcactttccttcttccctttgttagccagacaatatgtaatgcatattgtcactgactgcttaggtactctaaatttatgaaactttacatgcatctgtttaatattcacagccaatctcagtttccaagatggagagtagggcagcatgcttatgcttaatggatgcatccactaacaaaagtagtgatgaagtcaaatatgaagtcataagaaacaagattgtatattaaaaatctaagtaatgcttactatttctatcagagggttgttatctaaaaggtcatgcttttgaggagagagaaaaaaaaaaacactagacataatacatcatagaatttccaccaaaaaaaagggtaacattttttgcccagttgaagtggacaggcattacttgacagagggtcttgattcagtgtgtatatgaagaaatggtagatttttaaatcttttttcctgtgcttagtgggcacaaaattgtaacaaaaattactatgtttcctcctgttcttgctgatggctagcataaaattaaactttaaaaatcctagctgtctttaatacaatgcttcccaaccttttacatttcacagtaaaataacaatttaaagttgtggggcataccaggttaactggacaagatgcttgaagccagaactcactggcctggaagcttctctgaacactttgcaggccgaggcatggttgtaacctgtttgtagcacccagtctgagaagctaggcttgaatgtaggccagactaaatatttgaaagtttaaaaacaccatatatatggtatcattttaattaaacgactgacattgtgattaaacaaaggaatgaaaatagcagttcctaagggctccgatgactactgcagcaatagaaataaacaattcctgttactcactcttacaccacattttagcccacatacatcaaactcagttttaggcaccaagactcactcaggcccaagaaggtagtaaggaattcctactctgcacattgcaagtttaagtttacgggcatccagtgccaaaatgtcacaagctaacctgcagaaactgaatgaccatggaatgctgaaattccaaaagaaaaacgtttcttcacttcaacctctgaatccagaaaaggactcatcatgtaaacagaccccaaataggttgccaggctatttacaaatttattacgaataaggtacatagtccaataccagtacaattttattttagaagtggaaggaatgaagagcagtggcttaagatttctatatagggggaaatccagtgaccatctagttagaagtgggagctggggaaagtgtcttgaagctcagcaagcaaagcaagcatgctttccccacccaaactgcatttatttgaagtgaacattagggagctgatgaggacgaggagggctatgataaaactctctgaagccaccccttcgtgccattactgagtgttagaaagtacctaaatttatttggtgctttctcatattaatactgtaaatggttaactattctcacattaggtggaaaacaagattaggtgttctacaaataggaaatagcaacaacttatgtattattttctcccataaactagcaagaaattaattcttaatgatttccaatatagttatattcacctttgcaaatgtccctgttcagcctacgctgtgcttagatggccatggtcattggttgtatttgtaaaataagagctaagcagaaaagaagattttaacatataatttggactactgaagaagtctttgaagagatttcttcgaaattttgggcaatcatgaagcaacagcagttttccttaagtaatcacaaggaatttgggtccttaataaaaataaaacttcattacatgatgtgtattgacaaattaaatgaacttactttctaaagtacaacaaaggcttcaacaatttttctgttgctataaacactaatttattaggaaacaggaactgataaaaatatcttaagttaacctgcacataaaagaaggctctgcctccaatgtgaatgagacagcggcaaacgggtatggatttacttgagaagtgctgctactgtaggcatagcaattggatttgcatttgaacaaagtcaaggttattagtaatgagaacagagacaaatctgagactgatcaaagtgggtacctaaatcagttcatgataatgttctttaatacatctggtataaatatatttgaaacactcattctcttaccttctgcagtttaatttgaagtttaggcttacaaagatttcccaaagttaatccaatgcatcccccctctataatttcatttcaactctagaagtcagaatgatatagtgacaagaacattcaataaggagctaggattcatgagttccaaaaaccctgactgctatcaacttaggtcattacttttagtaagtcatttactaggcttctaggtttgaaggagatcacctataaattaaagaccagctcaaaatttctgtgatcttacctaaaatatgtcattgtattataaataatcctgttactgtggatacaaataacatgtgtgtaagttttggatgtttgatttcttatgttacatggatttttctaggtgtacctttacagtttctgtcctatgctaactatatacttaggtctttaagttaaggctatattttttaagaaataaactcagggagcagagaccacttaattgtctagtaaacttggtgaactgtgcacgtggtaactaattgactgatattcatatataaagtaggtactttatattgcagtttgacaaatttagtctaattccatcatcagaaagaatggggcagtggaactcatttaatgagcttcaatataccaatatgttggctgggcatggtggctcatgcctgtaatcccagcattttggaaggtcgaggcaggcggtcacgaggtcaggagatcgagactatcctggccaactccgtgaaaccctgtctctactaaaaatacaaaaattagctgggcgtggtggcacatgcctgtaatcccagctactcaggaggctgaggcaggagaatcgccagaaccagggagttggaggttgcagtgagccaagatggcaccactgcactccagcctggcgacagagcgagactccatctgaaaacacacacacacataccctcaatatgttgattcatttgatgagaaatgattaaagaagaaatactgaccaagaccataatcaatactgcaatcaaatgaacattcttttctttagcagtctttaggctaataattcaatcttttgaatttaagctttctggatgttacctattacttcaaaattgttataatttccttaaatctaagcctccatgcttctatccttccccttttcacccctacaaataggattcataaaacatgtagtgggaatacgagaagtggactcaggaagagcagagctaactacttctaagtatatttggaaagttaacacattttgtcatgccacataactaattcctttaaagaaattgatatttaagacatttagacagtataggattatctggccatgcagatacatgaatgctgaattctgccacattcctagttataaaaagattcaggctaaatacaatcaaactattaatttgtattaatctttagcccattttggcacttagacagttggtcatctctgatctagatgttttataggtacatagttcagttcttcctacatacaacatcttatagcttctatatacctcatttcaaacaaaacagaatttcataaaagcctcatgtaacttctgtttctaccaatcattacgttacatgaaatagtatttgatcaataaggcaattctgtgtcaaattttatacacaatttgcttcttacaaaagaaagactaacatctagaatttattcaaaatgtgtcgtggtacaaattcctttaatgtcgccaacctaattcataacactgtcatgagaattactattaccttgtatgagttactccagggatcaacaaatgacaacctgtggactaaattgagcccatcgcctattttgtttactggaacatagccaaacatattcatttacatactatctgaggctgcttttaccctacaatgatggagttgagtagtttacaaaagagactatacacgaacagcaaagcctaaattattttatctgccctttatagaaagtttgccaatcctgagctaccctaagggtctcatcataatggaacttacagcagtcaaaacactattaccaacagaaaaaatagagtgctttcataaataaaacacgaggcacattaataaatggttattatattaaaatgcttcaggtatttaaaaccacccaaagttaatgctaaaatcaaaatgaatatgttccttccaatagtcttactatgtttcttcataaaacatttctgtaaacataataaaacttgttttaagtgtaacttgtgaatttatttgacttaatcacgtttaacatttttatttgatccaagcagtcgggcagaaattgctttgcaaatcaaaaactcacacataaatcaactacatacatgttagtgaataaaatttccttcaaatgtagtgaactaaatttttaaacatagtgcttttttcccaactaaatctgcttttctcaaaactgtataactttgtaattactttatgtttgtccctatagtctctgcaaaaacaaattttgattactttttttttttttttaccttgagatcacggtacacaatctttccggaatgtagatagtccaaggcagagacaatttctgcaccatagaaacgtgtgcggtcctcagagaacacccgctctctcgacaaatggaaaaacagctgcagggtaaacagcagggacaggattgtaataattactgatttagtgggggaaattaacacaaacataaaacacctctcatcaccatattgtgatgatagatagtgtactctcagtggacactgagcactcttagacagcagctggcttatcttttccaggtttccaaggggaaactgcgagctgttaaatcagcgttttaatcaatataccaatcttgtttaaggcattctgcttgctacccatttaaccttcagttaccagaggaaaaaggtatgcatcatcagattgcagtttccccctcactatactgttgcttcactcttcaaggattaggtattgagatattactaaaataaatgaacacaagcacagatatattttcacttaattatttgatttcaaagacaagactgtcaatttgctgaaactgatttacgcgaacttgttatattctacaatttttgattaatcatgatatctctaaaaatattttcaaagtcaaattattattgaaaatagaaaataatttgacattttctatggtgagaaactttaaggttttatgtttttaatttattttagtaatgcccaaaatgaactgagaaacatccattattcctattgcagttctcaatgtatattctattttcaataataattagctacaatgccagtcctttctcatattatcactaaaactataagcccatccatttcctagtcaacctcttaaaacatataccattcgatagtcaacaaacattcactgggtgcttactgtgaccaagtacacggctctccaataggccacttcttcattaaagaaactacaaatattatctcaattggacaacatacatgaagaaagagcaggtttcaggcactgtgaattgactattaatctttgttgttgaaacatgctcagaacaatgaaagattgtttacagtgctgagtatattgccaggtatcatggttattaatagatacacaatacatgtctgtgaaaaaaatgaaccaatcagccaatgtacccttgactgcaagatcagaaatttttcccttacatggatcattgactcataatgtttctacaaaattggtgaaaattatggttaactaagatttgttctgcatacaccaaagtcattatttcaagtaacataaaacaggttccctataaattcattcttccccattcccacccccaccttcacttaacagcatattataagataagctttatgcatgacccattggcatagtaaacagagagagagagaaaatatcacctatagccccaaaaagtgtagcacaacaataattatattaaaactaaaatattttgcagtctctaaactttaatgcttcctactatattactgtattttatcaaatctcatatgctacgaattgggactgcatcatcattttataaaacaccaaggtaaaaaaggttgtcagttaaaactataacacatgatctattctaaaaggcattctgattacagaaatgttaagtatgtcttccaaataatcaaatacagtatgtgaaaaatcaagtcatttatacaattactcagggatattttaaaaaattcattcatttcatatagttagatatatattatcaatgtattaccagcctaacaaggatagaaagtagaaggagccatgttttccaggttaaaataatttctgccatgcaaaatatcactaactttgatgaaaagatcgtgtgatctctatgtggagttgcagtagtcttctaatgagatgaaaatagtgattaggtttctaaattttcttaaaagaatgtcaagcctacttacccactcatttaactttacaaaaaatatggatcctccctaaatcgatataatatatgcaagattctagatctttatttagactatgtatcttcaatgtgtctgccagccaatttctataaatatatcagctaaaaattatatttaagggtaagaatttacttctcagtctgctatctgatgtgtacccttactactttatggaacttgttaagataaccaacaacctcttaatcgccaaatccaataatctatttacagtctgcactgcttcttccaaatctgaagcttaggacatcacctactgccctctttcttgaaacacatttctgggctttggtaatatgactctctcctgatttgcctcctaactctctggctaatccttctcagtttctactttggctctgaaccaacttttcaattcagcattcatttagtgagtatcaattattttaaagtcactgctgggcactggagaagagaaagagggaatacagtgataagacagaatctcttatgattccaagcattgagtgcggtaacattctcatgagtatacacttaactccaaacccatcaagttgttccgattaaatatatacagcattttgtatatcaatcataactcaataaagtggtttaaacaaaagacaattcctgccattaagcaatatgaatgaagaggacacaggtattgatttttaaaaaaagagggttgtgataacattttataactcagatattaaaagtactttgaaggcaaagagggattaatctgtgctggcatcatgtaaggagacttgatagataagaaaaagctttacctaagttttgaagaataggtttttcataatggaaaatttaagggaaaaatctccaaaaaagtgctactcaagttttatccatttgtatttccaacacagcctaggacagtacctgcacatagtaggtgattaataaaaatttagaaagcattaatactaaagaggaaaaatagcaatggcaagaaaacacatgtagggaacacatgtagccaaaaaataatatataatcagagaaataataggacttctggaaaaaaaagatgagatcagattggttaggatctttactaacatgacaagagcatgaattttttttctgtagataataagtatgaaagaattttagcttaaaaattagcataatttggatccacatatgcaaatcaatgaatgtaattcataatataaacagaactaaacacaaaaaccacgtgattatctcaatagacacagaaaaggccttcaaaaaaattcaacatcgcttcatgttaaaaattctcagtaaactagatattgaaggaacatacatcaaaataataagagctatttatgacaaacccacagcaaatatcacactgaatgggcaaaatccagaagcattctccttgaaaaccagcacaagacaaggatgccctctctcaccactcctactcaacatagtattggaaatgctggccagggcaatcaggcaagagaaaaaaataaagagcattcaaataggaagagaggaagtaaaattgtctttgtttgcagatgacatgatcctgtatctagaaaatcccatcctctcagtccaaaagcttaagttgataagcaaattcagcaaaggctcaggatagaaaatcaatgtgcaaaagtcataagcattcctatacaacaacaacagagaaccaaatcatttatgaactctcattcacaactgccacaaagagaataaaatacctagaaatacagctaacaagggaagtgaaggacctcttcaaggaaaactacaaactacggctcaaggaaataagagagaacacagacaaatgggaaaacattccaggctaatgaatatgaagaatcaatattgggaaaatggccatactggccaaagtaatttatagattcaatgctattcacaataaactaccatggaaattcttcacagaattagaaaaaaactattttaaaattcacatgggaccaaaaaagaacccacagagccaagacaatcctaagcaaaaagaacaaagctggagccatcacactacctgacttcaaactatattacaaggctatagtaaccaaaacagcatggtactggtaacaaaaacagacacataaaccaatggaacagaatagagaactcagaaataagaccaaatatctacaactatttgatttttaacaaacctgacaaaaacaagcaatagggaaggacatcctattgattgattgcttgattgaatgattgagacagagtctcactctgtcacccaggctggagtgcagtggcatgatcttggctcacagaaacctctacctcacaagttcaagcaattctcctgcctcagcctcctgagtagctgagattacaggcatgtgctaccacactgggctaatttttatatttttagtagagatggggtttcaccatgttggccaggctggtctcaaactcctgacctcaagtgatctgcccacttcagcctctcaaagcgctgggattacaggcatgagccactgcatctggccagcactccctatttaataaatggtgttgggagaactagctagccatataaagaaaactgaaactggaccccttccttataccttatacaaaaattaactcaagattgattaaagacaaatgtaaaaccccaaactataaaaaacctagaataaaatctaggcaataccattcaggacataggtacgggcaatgtttcatgatgacaacatcaaaagcaattacaacaaaagcaataattgacaagtgggatctaattaaagagcttctgcacagcaaaagaaactaccatcagagtgaacagacaacctacagaatgggagaaaatttttgcaacctagccatctgacaaaggtctaatatccagagtctacaaggaacttaaacaaatttacaagaaaaaaaaatccccattcaaaagtgggcaaaggacatgagcagacacttctcaaaagaagacatttatgtgaccaacaaacacatgaaaaaaagctcaacaccactgatcattagaggatgcaaatcaaaaccacaatgaaatagcatctcacactagtcagaatagtgattattaaaaaatcatgaaacaatagatgctagtggggctacagagagatgggaacacttttacaatgctggtgggaatgtaaatgagttcagccactgtggaagacaagtgtggcaattgctgtaagacacagaaccagaaataccctttgacccagcaatttcattactgggtatatacccaaaggaatacaaatcattctactacaaagatacgtgcatgcatatgttcactgcagcactatcacaatagcaaagtcatggaatcaacccaagtgcccatcaatgatagatggataaagaaaatgtggtacatataacccaagaaatactatgcggccataaaaaggaatgagctcatgtcctctgcagggacatgaatggagctggaagccattatcctaagcaaactaacgcaggaacagaaaaccaaacaccgcttgttctcactcataagtgggagctgaacaatgagaatacatgggcacagggagaacaccaccacacattagggcttgtggggcagagccaagggagggagatcatcaggaaaaatggctaatgcatgctgagcttaatacttaagtgatgggttgataggtgcagcaaaccaccatggcacacatttacctatgtaacaaacctgcacatcctgcacatgtaccctggaacttaaaaataaaataaaataattagcataatgttaaaaaggcaattcgggtagcaatgagagaatcaactaaaaatgcctgagactacagactgctaaacaatttttaaagtacaacaaaaaagttactgatcaccactgttatgaaaagctgcagacacaatgagagaaaaccgtaccaatctgcaaggacatcactatctggttacaagagccagatacataaacttttctactaaagttacggtaattattataaagcagaaaagacattcaaagaataagcatgtttggaaatatcagaagttatatttgagcttgcagagagcttctgagggacatcagctaaggtagtagtaacagacatataaagagaatcaatattccagagggaactagcttttaccacttgggtcaagggagaaatcaacgatgttgaggtttctctatggctgactgagtagatgctgatataaaggaaaagaatgggaatggggacagaggagcaatgggttttattttgacatgctgatatctaaataggcatttgataacacagctttgcaagttcatgaaggtagatatgggaatcattcatagaaaggatattgttaagactgagaaagcaaagaatagtctaggaattcagtaaaaactgaaaagataagtgaaggcagaatcttagggtactactatacataggacagaaaaaagcagaacaggacattcagatggaatactaagagatataaaaaaaggaagcaagactacaagaagtgaagggaaaataaagtttcagaaagacaggaacatttgctgtacttaggaattaggtcatctgttacttttcaaaggtaagttgtcatatttaggtgggctgaaaagagaatgtgaaggtagaaataatacaccattcctttaaaaaaatggatgaggtgagccaaggtattattgaaccagaaggtttctgtgcaacatattaaatagtgccttcaagaaaaaggtttgtctaaagaaattgacttatataactacaattcatatggaataggtacacaaatgaaacaccaaagaaataatgaagcaaggaacaggttattttaggttataaaaatttaatacagaatacttgaacatgacaatatatgataaagtatacaggaaaatgacaaatagtgcaacaataattaactctgaagaaacataaaatttaattttcacctcataacaaaataaaatttatatgtattagtccaatataaaattaaaaaactagaaaatatgtgtaagtggttatctagtctcaagatgaagaagaattttctaagcataaaagaaatggaagaaatagactttttgcttttccccaagagggtgggttagaggctttctgcacgcctcagccacttggacatagcaagatagcagataaagataaactctgtgagctttaattcaagaaggaaaacaggaatctactggaatcatgacgtacactccagatcccagagaggagaaggccagcaaacagccccactgacggcatccagctgataaaagttaagtgaagccccagtgcatgagagaggcaaggagcctccctctgtgactcacccttccactggggatccaagcaacctaggccaagggagagcactttgtttctcccagtcctggagctaacttggggagtggcctggagtcactgtgacggaaaaagctgaaggcatttttccagacccgggaaaaagagcaggacaatgttttaaatttgggcacataaaaactcagccattccttggtgacccagcagtgtggctgcacaggcatgtcagtcttggaccagagatcaaaacacctgctctggaatgggataggggcttcacagtcaaaactgtggaaagtaccccaacaacagggctagaattgtgctttccccactttcaagcctggggcagcaggagagccgctacagctgcagtttctcctgggctgcaaaacttgcagtcacgttcagcttggcaacctggaacagattcgcatgtgccattgccgggtaacccactctgttctcctgagattgtggtgcagtagggcccttgctgctccatctccaagcacatctctggcatccagagtaaccatttgcctagttgagtagcctgagccaccgcactcctcctggacataacgttatggtgaagcagagctctctctgctccatacccaggaagatccctaggcattcagagcacctccttgcctgcttctggagtttgagtcaccccacccctcctatgcagagatcttagtgcagggggtctctgctccatgctctaggcatcttgagcacctactctcctggactagaagtttagaccatcccctatccctgtgcagagaacttggggctgaggaggtttcccagctacactactaggcacatctctgggcccttggtggccacccactgcattctccctcggcactagtgcctgtgtctgtcatcaggggacctgtaggtggacctgtcaggtctggccctgccattcctgccctctgccaaccccctgaccctggggctgggcagtgagctcagaccatggtacattccatgaattggccatagcctgtggcaacaaagagcttctgccagtaaacaagtatcaaggtatacactaagccatgttggctgcagttagctcttacctctaagtgccatctacaggcttgcaggtcaaatgccacagcccaaaataaaattggccaaaagcagcacagaggactaaagaaacaaagtcaaagaccctacccagaattctctatagtcacattctgaagggaggggaagaaaagggaaaggagaaaaaaatatataataacattatagggaaagaaaaagaaagaaaaaatcctacctgcatgaaaataattacagaagttacaagtgttagggtctccagataagaaaaaagcagcgtaagaattccagcactatgaaaaatctgaatgtagtgataccaccaaaggatcacactagctctacagaaatggtccctaaccaaaatggaaactcagaaatgacagataaagaattcaaagtagggattgcagtaagcccaatgagatccaagacaaagttgaaaatcaacaaaaaaaaacttctaaagtaatccaggaaatgaaggaagaaataagcatctttaagagaaatcaatcagactttctggaattgaaaaaattcacataaggaatttcaaaatacaactgaaagctttaacaatagaccggcccaagcagaagaaagacttgcagagcctgaagaccagtattttaaactaatccagtcagacaaaaataaagaaaaaataattttaaaaaatgaataaagtcttcaagaaatatggaattacagaaagtgataaaacctacaaattactggtattcctgagagagaagaagaaaaagttaacaatgtggaaaatatatttgaggaaataactcaagaaaactttggtaatcttgttagggagacagatatccagatacaagaaatccagagtacaactgtgagatactatgcaaaataaacatcactaaggatattatcaccagactgtccaaggtcaacactaaagaaaaaaaaatcttaaaggcagctagagaaaaagggcagatcagagggaatgtcatcaggccaaccgtcaacttctcagcagaaaccttaccagccaggagagactggggacctatttttagctttctcaaaaaaaaaaaaaaaaaaaaaaaagaaattccaaccaagaatttcataacctgccaaaccaagcttcataagtgaataagaagtaaaatcttttccagacaaacaagcacaaaggaatttgttacaactagaccagccttatgagagatccttaagggaattctaaatatggaaatgaaagaaaaataaatgctaccacaaaaatgcatgtaagtacatagcccacagaccctataaagcaaaaacacacactagaaagtgtaaggcaaccagctaataacttcatgataggatcaaaacatcacataacagtattagctttgaatgtaaatggtctaaacacctcacttaaaaggcacagagtggcatgttggataaaaaaacaagactcatccatctggcttgtcttcaagagacccatcttatatataatgacacctataggctcaaagtaaaggtttggagaaagagctaccacactaatggaaaacaaaaaagagcaggaatcactattctttcatctgataaaacagacttcaaactaacagcagttaaaaaaaaaaaagacaaagaagagtattacataatgataaagggctcaattcaacaagaagacttaactatcacatatatatcttccatatatatatatatctctctctctcttccagtatgtatatatattccatatatatatctctctcttccatgtatatgtgtgtgtatatatatatatatatatatatatacacacacacacacacacatatatcttccatatatatatctcacatatatgtatgcacccaatattggagaacccagagtcataaaacaagtactactagatctacaaaaagacatagacagcaacacaataatagtgggggacttcaacaccctactagcatgagtgagatcattcaggcagaaaagtcacacattctggacttaaactcaacacttgaccaactgaacctgaaaaacatctacagaatactctacccatcagccacagaacatacattcttctcaggtgcacatggaacaatactccaagactgaccacatgctcgtccttaaagtaagtctcaaaaaaaaaaaaaaaagaaaaaaaaaagaaaaagaaaaagaaaaacaaacaaaaaaaccctgaaatcatactaaccataatcttggaccacagtggaataaaaacagaaatcaataccaagaaggtatctcaaaaccatacagttacatgaaaattaaacaacttgctcctgaatgtcttctgggtaaacaacaaaatcaaggcagaaataaaaatagtatttgaaataaatgaaaataggtacacaacacaccaaaattccagggacgcagcaaaagcagtgttaagaggaaagttgaaagcactaaatgcctacctcaaaacattagaaagatctcaaattaatactctaacatcacatctagaggaaccaggaaaacaagaacaaactaacccataagctagcagaagaaaaaaaaataactaaaatcagagcagaatggaacgaaattaagacctaaaaatccacataatgaaatgatgaagccaaaagttggttctttgaaaggataaagaagattgctagactgctagtgagattaacaaaggaaaagagagaagatataaataaccacaattagaaatgacaaagattacattacaacttatcccacaggaatacgaaaggtcctcagaggctatgtgtctatacatacaaacaagaaaatctagaggaaatggataaattcctggaaacacacaatttaccaagactgaatgaggaacaaattgacacactgtacagactaatatcgagttccaaaactgagtcagtaataaaaaaaacctaccaaccaaaaaagtcccaaacaagacggattcacagttgaattctatgtaaggtacaaggaagaggtggtataaattctactgaaactattccaaaaaaatgattttacaaagccagtaacatcctgataccaaaacctggcaaagacacaatgaagaaagaaaatcacaggactatatccctgatgaacacaggtgcaaaaatcctcaacaaaatactagcaaactgaattgaaaaacacatcaaaaagttaattcaccatgatcaagtaggcatcattcctgggatgcaagggtggttcaacatatacaaatcaataaatgtgattcaccacataaaccaaattagctttcaatgaaatccaacatcactttatgataaaaaccctcaacaaactaggcatcaaaggaacatacctgaaaataataagcaccatctatgacaaacccacagccaacatcatactgaacaggcaaaaactggaagcattccccttgagaactggaacaagatatggatgccccctctcaccactcctagtcaatatattagtggagagtgctagccagagaaaatcaggtaaaagaaagaaataaaaaggcatcctaataggcaaagaaaaagtataactatctctctttactgataatgattcgatactcaggaaaccctaagggctccaccaaaaggctattagaactgataaatgatttttgcaaggtttcaggagagaaaatcaatgtacaaaaatcagtagcatttctatatactgataacatccaagctgagagccaaatcatttacaatagccacacacacaaaaaaatccaggaatacatctaaccaagaaggtaaaagatcattacaaggagaactacaagacaccgttaaaagaaatcatacatgacacaaacaaatgaaaaaacgttccatgctcagggactggaagaatcaatatcagtaaaatagccatatttccctgcccaaagcaatctacagattcaaggctatacctaccaaactaccaacatcatttttcacagaactggaaaaaaaaaactacaaaattaacaagaaaccaaaaaagagccagaatagccaaagcaatcctaatcaaaaagaagaaagctagaggtatcaaattacctgccttcgaaccatactataaagctacagcaaccaaaacagcatggtactgtaaaaaaacagacacaaaggccaatggaacataatagagagcccagaaataaagccagccacctacaataatctaatctttggcaaggctgacaaaaataagcaatggggaaaggactccttattcaatatatggtgcttcgacagctggtgagccatacgcagaggaatgaaactggacccctatcttttaccatatacaaaaattaactcaatattggttaaagatttaaacgtaaaacctcaaactataagaatcctagaagaaaatctaagaaacaccattcttgacattggcactggaaaaaattatatgactaagtcctcgatagcaattgaacaaaaccaaaaatcgacaagtgagacctaattacactaaagagaatctgtacagcaaaagaaactatcaacagggtaaacctacagaatgggataaaatattcataaactatctgacaaaggtctaatatccaaagtgtataagaaagttaaacaattgaacaagctaaacacaagtaacccaataaaaaatgagcaaatgacatgaacagacatttctcaaaagaagacatacaagcagccaccaaatatgaaaaatgctgcacatcactaatcttcagggaaatgtaaatcaaaaccacaatgagatatcatctcataccagtcagaatggctgccattaaaatgtcaaacaataatcggtctaatagtacaataacatgttgacaaggctgcagagaaaaggggatgcttgtaacactgttggtgggaatgtacattaattcagccactatggaaaccaattctgagatttttcaaagaacttaaaataaagctaccatttgacccagcaatcacattactgagtgtgtacccaaaagaaaacaaattgttctataaagtagacacaggcacttgcatgttcattgcagaactattcacaacagcaaagacatggatagaccggattaagaaaatgtggtgtatatatatatatgccatggaatactatgcagtcgtaaaaagaacaaaatccggtcctttgcagcaacatggatgcagctggaggccattatccggagtgaattaacacaggaacagaaaaccaaatactgcttgctcttgcttataagtaggagctaatcaattggtactcatggacataaatatggtaactatagaaactggaaactactagaggaggggaggggttaaaaagggtggaaaaattaactgttgggtaccatgctcagtacctgatcatgggatcatttgtatgccaaacctcagcatcatggccatatacccaggtaacaaacctgcacaagtaccttcttgaatttaaaataaaagttgaaaaaaataaaaaagaaatggaataatgaagggaaaatccagtagatttagccatataaagtagcaaagatagaaataaaatggagtatttataacatgtgacaaagctcatattcttaatataaaaaaaaattaaaagactaaaacacaaaaaattgggtaaaggtacaattaacctgagagggctacaaattattaatgtatatgaacataggccaccttgtaataatcaatgtaacagagacaaaacttaaaaaagggcaattttaaatttatgaaaaattagtattgtcagtgaaagtgaggtgagataagcatctttatacactggtggctagtatgtaaacagacagtctttgcaaaacaatctggcaatagatagcaagataatttttaaagttcggtagttgctctcctagaaatttccttaaaaaataaaaatatacgctgggtacagtggctcacgcctgtaatcctagcactttgggaggccgagactggcagattgcctgagctcaagaattcgaaaccagccctggcaacacagcgaaaccccgtccctaccaaaagcacacaaaaatagctgggcatggtggcgggcgctgtaatcccagctactcaggaggctgaggcacaagaattggttgaacccgggaggtggagcttgcagtaagccgagactgcaccactgcactccagcccaggtgacagggcaagactccgtctcaaaaatacatacataaatacatacatacatacataaaaatatagaagccatcttctacacaaggatattttcagaagtatatacattgagaaaaatgtgaaaacggccttccaaccaggttgaagaaaaattagatttttacctcacaatataatacgataaatttcagattttttagtattttaaatttcaaattttttatattttttagttaactactagttaagaaccagaatatatgagtgaaaagtcaacaggactgaacttacccaactgccctaaacatttgatgggcatatctaaaacagaagatgaaaactgagcaaatatataaaagaactctcattagatactggacaagaggaagtgcatgacgatggtacctgttacaacagaaacaaatgaggtgagccatatgattatccaccttttgtctgggggcactttctgacacattattgaggaagaaaaatcacaaacctaattcaagggtttcactgctgaaaagataaacatcagattttgaggatgatgaggtagatggcatttgcaggacagaacactaatgaggaggaagctatacagaatctgcacagttgagtctgcagttgaatactaagcaatgcatgtgtagggtttaactttatgaggacaagcagagaaggaaaggaaagctgtaaatatgtagtagctcttagagctcacgcagagctgagagacattcaatttttaggcagtcagagaagagtcattactgaactctcaggcattcagtagatatctcaagagtcagagtgaaacctgaacttacacgaacaaagctaacatcaatactgaaatatcaatcatatttgtaaatactgccttccagaataaaaactaacactctgacagaagaaaacaaaatccagtaactcacgtaaaactcaaattatctaatcaatggaagagaatcaaaagccaaaaataaatccatgcctatatggtcaacaaacatttgacaagggtactgaaaatacataagggagaaagaacaatctcttcaataaatagtgctaggaaaactggatatacacatgcaaaagaatgtaatggagtcttatctttcatcatatcaaaaaaccaactcaaaatggattaaaaacttaaacgtaagacctgaaactataaaactcctagaagaaaacataccaaaaaaacctccttgatattggtcttggcaagtatttcttggatatgacaccaaaagcacaagcaacaaaggcagagataaataggtgggactactatttatctctttgcttatgtgaagcaaagaaaacaatcaacagagtcaaaaacctatggaatgggagaaaatacttgcaaataatatatctgataagaggtcaatatcccaaatatatacaaaactcggctgggcacagtggctcacgcctgcaatcccagcactttgagaggctgaggaggatggatcatgaggtcaggaatttgagaccagcctgaccaacatggtgaaaccccgtctctactaaaaatacaaaaatcagccaggcgtggtggcaggcacctgtaatcccagctactcggaaagctgaggcaggagaatcgcttgaacccgggaggcagaggttgcagtgagccgagattgtgccactgcactccaacctaggcaacacgagcaaaactccatctcaaaaaaaaaaaaaaaaaagaaaaaaaaagaaaaaagaaaaaaaatctgatcaaaaaatagggaaaggacctgaatatacttttcaaagaaaatatacacgtggccagcagatacatgaaaaggtgctcaagatagatcactagtcaacagagaaatgcaaatcaaaaccacaatgagatattaccacacacctgttaggatggctattataaaaaagatgagatagcaagtgctggtgaggatgtggagaaaagggaacccttgtgcactgttggtgggaatgtaaattggtatagccattatggaaaacagtatggaggctccataagaaacgaaaaatagaactatcacataatcctgcaatctcacttctaggtatatatatctatctgaaggaaatgacatcaatatttcaaatagatatctgtactcccacatacactgtagcattattcactgtaattaaggcaggactgcaggtatctctattccaagaatggaaacactctatatatatagatttcttggatatgaagaagcaacatctatcagcagataaatggataatgaaaatgtggtatatttatacaatggaatattattcagccataaaaagaaggaagtcctaccatttgtgacaacatggatgaacctcaagggcattatgttaagtaaaataagtcagggatgacaaatactgtatgatccacttatatggggaatctaaaagaatcaaactcacagaaacagaaagtagaatgatggttgccaggagctggggtagggaggtaagtaaaatggggagatacttgtcaaatggtacaaacttccagttacgggtaagttctggggatttaatgtacagcatcatgactatagttaatgatactgtactgtatatttaaaatttgctaagagagtaggtcttaggtattctcatcacacacagacaaaggtaactgataggtgacagacgtattcactaattcaattgtggcaatcctttcacaatacatacacgtatcaaatcactacactgtatacctaaaatttatacaattttatttgttcattatacctcaataaagccaagaagaaataaattaaaaaaagaaacccccaagaacaaatgatttagcatccaatcaacgtttactaaacatgacaagatgcaagaaaatatgacctataaccaagagaaaaatcagtcattagaaacatacctaaaaatcagagatgatggaattaatagatactgacttcaaaatagtacatgaacataaagaagagataaagggaaatagaaacaaatgagactgtagagataaaacaaacaacatctaaaataaaaaattcactagatggaattaacagattcgacactgaaagagaaaggacttctgaatgtgaaatcatagctaaagaatcgatataaattacaactgggaaaaaaaagcctcagtgacctgttggacagtatcaatgaatctaacacatgtgtaatataaattactgaaaggagaaagacatttgaaaaagaatggctgaaattttctaaaattggataaataactaaatgcacagatctacagttgcccaggagaaaagggaaatgaataaggtgatagttatgattactccagctggatacctagaaacaatgtccaggctgtaacacagggagaggaaaacaaaacaaaacaaaaagagcctacgaggatccttgatttaatgatactgagttcagagactggggagaccaaggtatctagaattcatgagacaggtaactagacagaagacagtaccaaagacagagctcgagagatctacaatggattgcctcggagtctcattgagcagcacctgtatgtggggaaaagctacggaaagagccactgaaaaggaccagatgaaacaatcaccaggctaacagaaaggcaaaaatatttcatgttctcacatggcaaaatagaaagatctcctaaaaactatggcatctaacagagttttaaaaaaatactgcctcaatagtgcagccgtgttagtgctagagcaaaggatattccagaccagtcttactaagcttaaaagcaagcactgataggatcatactgtttatacataagaataatgcctaaatatattttttaatccccaaacttccagcatctgacaatgtaaaattcaatgtctggcatccaataaaaaattaacggacataaaaagaaacaggaaaataataacctataatcaggagactaatcaatgaatagaaacagactgagaaaatgacacataagatataattacacgaataccataataaattagccgttgaaaatataaaaaatagctgttgaaaatataaaagttcaaaaggtagagggaagcacataagatgaagatgaaaaaaaaagtcccaaatcaaacttcaagagatgaaaatgtctgaaataaaaaatatactagatgttactagacactggagaagaaagtattagtaaacttaaagacacagggggaaaaacccaaaattaaagacagagaaaagactgaaaaaaagaagagaacattagtaaacagtgggataacatcaagatgtctaacatgtaaataagtagattctcaggatggaacaagagaaatgagtaacaaaatacttacagaacaatattcaaaaattttccaaattgaatgaaaactatatgcttatagatccacaaggcttaaaacaccctaagcctggccaggcacggtagctcacacgtgtaatcccagcactttgggaggccaagctgggcggatcacgaggtcaggagatcgagaccatcctggctaacatggtgaaaccccgtcgctactaaaaatacaaaaaattagctgggcttggtggcaggagcctgtagtcccagctactctggaggctgaggcaggagaatggcgtgaacccaggaggcggagcttgcagtgagcccagatcacgtcactgcactccagcctgggcgacagagcgagactccgtctcaaaaaaaaaaaagacaaaaaacaaacaaacaaacaaaaaaccctaagccaaagaactgtgaaggaaaccataccaaggcacatcataatcaatagctgaaaggaagtaataaacagaaaagcttaacagcgaccacagaaaaaaagacacatgaagcacagaggaacaaagcagacttcttgacagaaactgtataagccagaagaaagtacagtgacatttttatagtaatgaaatgtaaaaatggcaaattagaatttcatacatagctaaatatctttccaaaaatgagaggaaaataaagccattatcagacatgtaggttagagaactcaccaccagagacactgaactagaaattgttcaagaaaatgtttcagaatgaaggaaaatgacaccacatggaaaacaggatctacccacaggacagaaaatattggaaatagtaactgtgtcagggaacagaaattaatttttcttctgttttaaatttccttaaaagataatcactggtttaaaacaaaaataataatgcatagtggcatttataacacatacaaatgtaaaatgtattgtaacaacagtacaaaggcttgaaggaggaaataaaagtataccagtgaaaggatcttaggatgtatgtgaaatggtataatctaagcggaacacaaaatgggaaaaaaagttaaatacgagtttatagttaaccgtcatcccacaataaaaactggagctcccaaaagttactgatgaattccaccacccctttaaagaagaaataattacaattttatagaaacactcccagaaaatacgagaacagttgttaacacgttgcatgaggccagcattgccacaatacaaaaccagacagaactattacatgaaaagatgagtacagatcaatatccctcaaaatcatagatgtaaaaacttaacaaaacttctctaattcaattccaacaacatataaggatgataatacattatgactaaaagatggttaatctcaagaatgaagactggcttaacatttgaatgtcaatgtaatttatcaaatgtacaaactaaaaagaaagccgggcacagtgtctgtaatcccagcactttgggaggcctaggtgcgtggatcacttgagggtaagagttcgagagcaatctagctaacatagtgaaaccccaactctaataaaaatacaaaaattagctgggtgcagtggtgggcacctgtagtcccagctgcttgggaggctgaggcaggagaatcacttaaacctgggaataaacctggaagctgcagtgagctgagatcacgccactgcacttctgcctaggcgacagagtgagactccgtgtctaaataaacaaccatatgatcacctcaatggaggcacaaaaacctttaaagaaaagtcaatgtccactgatggtaaaatattctaggaataggagagaacttaacctaataaaaggtatatatgaaaaacttatgactaacatcacacttaataataaaagacttaatcttttccgagacagggaacaaaaacacaatgttcgctacttttgttcaacactgcactagcagtcacaggcagtgaaagatgcatagacagatagacaattaaacagacaaatatatacatgccatacaaacaagaatggaagtaaaactgctattatttacaaagagcaagactatctacatagacatttcaaagaaatttagaaaaagggtttctagaactaataagtgagcttaggaaggccatggaatacaaggttaatatataaaaaccaactatattcttatatgctaacagcaaacaattgtaaatgggaaaaaattggaataggtaaagaaaaattgaaaaattatacaaacctatacactaaaactacagtgtttcaatagacattagagaaatccataagcaaacagagtgtgtgtccatggattagaagactcaatattcttaaatagatttatggattaaatgcaatcataatcaaagttacagcagacttttttgtaaaaattgacatgataataaatttatatgaaaatgcagaggacacagaagagtcaaaacaattctgaaaaaagaacaaagtttttctctatttcaaaatatactcccaaagcaacaattatcaagttagcgtggtactgatgtaaagagaaactcaaagatcaattaaacagaataagacagtgcagaaacagacccatatgtgtgacaaactgattttcaacagaggtacccaagtcacacaatcagagacagggtcttgctgtgttgtccagtctgcaatgcagtggtatgaacatggatcactgcagcatcaacctcttgggctcaagcaatgctcccaattctgccttgcaccaccagtccaggctaattttttaaattttttattttgtagagacagggtcctgctgtgttgcccaggctggtctcgaactcctggacataagtggtcttcctgcctcagcctcccaaagtgctgggattacaggtataagcccccatgtctgactaaaggacagccctttcaatgaaagatagtgaaagaacaagatgtctgtagggggaaaaaaatgaacctcaactcttagctcacagcatacataaaaattaaaatggatcacagacctatacatgtaataggtacaacttaaaaagttttagaagaaaatacagtcatgcactgcttaatgatggggatacattctgagaaatgtgcaattagacaatttcatcattgtgacaacatcctagggtttacttacataaacctaaatggcatagcctactacttctaggtacagacctgtacagcatgttaccctactgaatactctaggcaggtgtaacacaatgatatttgcacatctaaacacatctagaaaagtacagtaaaaatatgatatagaagatttaaaaacgatatacctgtctattgcatttataataccatgaatgaaacttgtaggactggaagctgctttgagtgagtgagtggcgagtgaatatgaaggcctaggtgattactgtagactatgaacactgtataatgtataaaataattaaaattatttttttcttcagtaatgagttaacctttgctttctataactttttcactttatacactttaaaatttttaaaaacgccttgactcttttataacagtttaaaatatgaacacattgtacagctatacaaaaatattgtttctttacatctttataaatatttttctattttttttaacgtctttaacttttggttaaaaatgaaaacacagcatatacgttagcctaaacctacacagtcaggatcatcagtatcactgtcttccacctccacatcctgtcccactgtaaggtctttcggagcaggcatcgagtagtcatctcctacgctaacaatgccttcttttggaatatcacctgaaggacccacctgatgctgttttacagttacctatttttttttaaataagtgaaagtaatacactttaagaaacaatgaaaagtacaatatataaaataaagaagtaacacagtcatgtactatcacaatcaagtattatgtatctaactgcatgtgctatgtttctacacaaccggcagcacaggtttgcttacaccagcatcaccaaaacatgtgagtaatgcactgcagtatgacttacaacatttacatcactaggcaatatgaatttttcagctacattataatcttatggtattgtcatatacatggcccactgttgacagaaacttattatatagcacgtgacacataacaaataggagaaagatgtgtgacctggggtacacaaacatttcttggacagtacacaaaaaaagtgaaaaccataaaaggcaagaattgataaataagacatcaaaattaaaaacgtctgttcctcaaaagacatcactgagaaaatgaaaaggcaagctacagtctggaagaaaccatttgtaatacaaatatttggcaaactatttgtaaccagaacatccaaagaactcctataattcagtaagaagatgaacaaccgaataataggtgaaatatttgaatagacaggtcacaaaagtatatgcaatggcaaaaagtctgagtgaagacatttcctatcattagtcataagagaaacgcaacttaaaaccacagtaacatactcccacacactcgttagaatgactaaaatgaaaaccactgaccacagcaagcactggtgagggtgcagaacacctaaaattctcattacattaatgctgagactgtaaaatgacacaacagttttaaatttttgtaaaatgtaagcatatgcttaccataaatccaacaatcatactcttcagtattaattaaagagaaaagaaacaggcctatcagctttattcatattaggcaatgactggtattaatccgcatgtacgtcaccagtgggagagattaacaaatggtggtatagctgtgcaaaggataatgacttcacaataaaagaaataaatgactgagaaatgcaacaaagttaacaatctcaaaaaacattacgcagaatgaaagaagtagatacaagacagtatatattgtatgagttcatttctgtgacatttttaaaaagatgaatcaaatctttagtgtctgaaagcagaccaatggctacctagggccacgtgtggatgtactatgggtacagggaagactgactgcaaagaggcatggcagaactttttgaggcaatgagaatgttttatatttttattgtgatgggggctacatgcatatatatgtttgtcagaagtcatctaatcatatacttaaaatgagttcatttcattatatgtaaattatacttaagttgactaaaaaatgaaaacaacctaaacgttcaatgatttgggaaggttttaataagttaaagtgtatctacataattagtaggcaacaagtaacatattttaaaatgataaaattgaaaatatgtgtacagtataaacagtggaaaatatattaacacggtattagcaattatttctagatggtaagatttagagtggtttttatcttctgtttcatacctcaaaaaatacttgtaattatttaatatccattccccagaatactatgcatttttgttttgttttgttttgttttggtgacagggtctcactctgttgccaaggctgaagtgcagtcgcatgatggctcactgcagcctcaacctcttgggctcactcaatcttcccacttcagtctctcgagtagctgggagcacaggcactggctaccacacctggctaatttttaactattttggtagatacagggtctccctatgttgctcaggctggtcttgaactcttgggttcaagtgatcctcctgccttggcctcccaaagtgctgggcatgagccactgggcctggcctatgcccttcttaaatgcagagaccatctgtcttgctcatgtagtatactaagcacatagtacagtgcctgccttgaagaaagcagcattcaataagaacttttttgacagaattaaaataatttttttggctttttgaagttctctgtaatgaatgtacattatcacttttgcaatagaaaaaaattattcaaaggtttcaaataaatgtactaataattaatgtactgatttatgcttattataaatttaatgctctatttttttcttggcaaaggcataggaaaatgagaaaattatgacagtacaccatatctttgcatcttcagcaccatgcctagtatatgacacatattatattcttcataaatatgtattgcaaaaaataaaattaaattcagaaatacctctcaaaaaattataagaaaaatcatccttaaggtttttgaggtaaaatattttcattggaagtattaaaaatcatatataatagttgaataatcttatctttgttcaaaaaggaaagtgaattatttgctgctaaaatagggagcttatctttatcaagttaagttcctttataaaggcaaagactacatagtttttttttattgttaagcttagccatgctataggaatacagtaatgtaaaatgcattaactcaaactactaaatatacaagcatatttcatcattctattaggaagaaattttctccataactctctctcataatagcctaacaggaactgcactagagtgtagctgtactcccacggtttagtaagtgaacaggtattcagcccatccttgcaaaaagatgactgcatctacagccgtgccctaaagtctcatgctcaacaggcttctctcatcagagcacaggaagttccttcccacatacccttcaaatgtcaacctaacactacttcctcaaagagataactaaatttatagtaggttctccatcattctctctcatactacagcactctgttgccattatatttattgggtttattttgttttattattttataatatgcatctccttctagaaatcatgactgttttattcatcctagcgaacgcagtaagcatttaatacatacttttgattgaatgagctaatcttatttggggaacatacctgttcttgaagatttagttcaaatgcacctttcctcctaaaatctcctgtataggagaacatttgtggggatgttatttttatcgtggtgatgatttcatgggtcaaaagttatcagattgtacactttaaatatgtacaaattatttataatttgttattaactcagcaaaactgttttaaagaaagggaaacatcttaagacaaaatgcagattttctcacacaaataaaagctaacaaaagttacggctatcagacctgcactacaaaaacaaatgctaaaggaagtttttatgcaaaaggaaaatgtaatagatgaaaatgtataccaacacaaaggaaaagagaacacttaaaatgactactttatgaatataaaacattttttctattaaaaattattttaaagataattgcttaaggcaaaaacagtgtattgtaaaggttaaaaaatacatggaagtaaaatgtctgagaacaactgcacaaaagacagaaggcagggaaacagatgtatgccttttaaggttcagatagaaggtaagaaaatagacgtatgctgttataaggttcttacagtacaggtaaagtgacacagcatattgtttgaaagtctaccgtgatgagaaaagatacatattctaaaccctaaagctaccaccataagaacaaagaagcagagctaatcaaactaagattatttaaactcatcaaattactaatagaaattcttcaacttttaataaagagcatctacgaaaaatctacagctaacaacatggttaatggtgacagtatgaatgcttctgccctaaaattaggtataaagcaaggatatttgctcttatcctgctctttaacactgttctaaacatcctggatagtttaataaggcaaggaaatgtacacatattagaaaatagcagtaaaactgtctttgttctcacctgacatgatcatctacatagagaaatccaatatatttacaataaaagactactaaaactaatattagtatggctaataagtaaacatcaactgtatgtctatatattagcaagaatcaactacaaattgaaatttttaataatgactgataaaccatttataacttaaaaacataaaataattataaagtatccctaaggataaatttttaaaactttcaagacctgtacactaaaaactacataatattgttgaaagaaattaaagacttaaataatgggaaaacatataccatatttatgaatcagaagacaacactgtgaaactgtcaattctccccaaattgatcaacagatttaacacaatcacaattaaaatccaggaggcttttatgtagaattcaacaagcttactctataatttatgtggaaatgcaaaggaaattggatagcaaaaccaaatttaaaaagaatatcaaaattgaaagattcaagctgcctgattttaacacttattctaaagtaagtgtgtggcatagtgaagacagtgtggtataggtttcaggatagatatagaccaatacaacagaatgcagagtccagaaatcgacccacacatatatgactgatttttgacaagggtaccaaatcattcaatgggagaaagacagtcttttcaacaaatatgctggaacagttagatatcactttgcaagaaacaaatgaaacatgacccttatgtagcagtatacattaaaattaacttgaaatggctcatagacctaaatgcaagagctaaaactattaacacttctagaagaaagcataaaagaaaatctccccgacctgccaccacccaacaggtctagctttgactttagaaaaaaatcttaacaaacttcagttagaaaaagatgttttaaaaacaaaatgtacaaatcataagagaaaataatcaatgaattgtgtttcctctaatttagaagtctgcccttcatactggttggaaagcctatcagtggttttcagggtgagagtgaggggagagaattgactttaaagagacatgcgaggctctgttgtgaaagaaacattctagatcatgattgtggtgatgggaaactgctttatacagctgtcaaaactcactaaattgtacagtcaaaattgattaattttactgaatgctaactatgcattaaaatgctgattacaatagattacaacaaaagtgtattttggaacaatttcccattatgaaatgaaaagacaaactataaaatgggagaaaatatttataaaatatatatatgataaagcccttacatgaaataaataaatctgacaactcaatattaagacaacaacctaatttttaaaacagacaaaagattttaagatacttcaaaaaagatgatgtataaatggcaaatcagaataagaaaagaagttcaatatcattagttatttgagaaattcaaattgaagctaaaaaataccactatacatccaccagaatgagtaaaatttaaaaagactaccatgccaagtgtggtgatgttgtcaagtaacatcctgggaatgcaaaatggtatggctgattttgaaaagagtctgcagtttttaatgaagttgatcataacaaatgacacagaaattgcatttctatgtatttacccaagaagattaaaaatatatattcacacacagatttgtactggaatattcacgagcttttattctaataggcccaaaatgtaaagaacccaaacgtctatccaggggcaactatataaacatatgactgtacatcacacaacggagcaaagccataaaaagaaacaaactactgatatatggaacagtatctataaattttaaaagtattatgctaagtgaaaaatggagaacacaaaagcctgtaagtatgttttcagattatagtttttgatatttaaatactgttttgtgtcactgccctctttttcctcctcagggtttccaattatacatatgttgcttcttctgttttccctcccttgaaatacccactctgtggtaagccagcctttgtgtaagaagtttgactaccttgaaatggccatgctctgccataaccacatggaaaggaatcatgtaaatacccagatgcctggcaggcccctgcagttccagccacttgatctgagattttagatttgtaagcaagcatgttacatgttgaggcttgtaataacatctcctaataactaaattcaatgcattcaattacatttaatgcagtgagatactggtttaaccattcattttttaaaaatgtctttgaattatgaaattatatactaaaaatgcttcccgactttacattgcctttagatgctaatgtaaacattgtaatgcatccttcttgacttgggaattttgaaaaagcattgggtgaaaaacaaaattctgatacaacctacataatatattaataactaaaatagttagcaaagaaattagcttgtcagacacctgacaataaagatgtttatatacctgaaaactttgtaaaattttaaaaatcatcactatgaatatgaaatgataattaaattaatttaaaaatcacccagatcacacctccgtaaattagtaaggagaactagaatactgactactggtgcttttgtcttatgtgaatttaaaatgagataattttggttcactgataacaaaatgccagccaaatgagaaatctgaataagcatgagaatctcaagaatggcaagaacctgaaagccgtattgcaaaaaaatcaaatacatgttatcaaagaaattaatatagagtttacaatgaactaagtatggacaaaaatagtagtacataactgaaactgttagcttcattacaacctacataaagaaaatagaggaatgtgaagaatttatcagatgaatagcatttctacacaatgattttcctttactcccctaatgaatctttaacttcaggaaacttcagacttgagagagatttgcagaggtccaacaaataagcctgaaataaatgaagctatgagtaagattttggaaacaagtcctaagtagagacttcctaaaccaaagaaaacaaaaacacctccttagtcaattttgtctactttattctcccaggatatttttctgcttctcatgtaaatttagtaacatttaaggaataaaaagagagctgcctggatatattagcagtgtgattggtcatattattagagagattttacaatcagttctacaaatgccccactgaaattgcactgaactcactcttacaaccttgttctactgggctccaaaccaacccttttacattctgtactacagccaaggtgcataccttgtaccaaaccagaaaaggaagaatccctggtagtctccataggaactattagatggcaaatccaatggacaattctcagttatcattgtacagtatttaatatactctgttgtacctaatctctccttaacttctaaggcttctcttgtctggctcctcctgcccaggatcctccttaggcttctctctgcctctacacctgtgcactagtctcactgcatctacagctgtgtctacagcatgccttactctggcatttccaggcaccatccttggccactgatgttctaactgtacatactttcctcacattggatatttcctcacttcctgggttttaacactgctcatgatgcctatttgtatctctgatttaactctccccactccttggctgccacactaggtgcctcaaatatagcatgatctgcttaagaactcattcttctccctgtgttttctatttttataaatactccagtatccacaattccccaagcagcaaacaggaaatcatatgatacttctctgcatatttattcattaaatcctggtgattctaataactaaatattactagaatttgcttccttctaacactgcttcaattaataatcttttttttttttttttttgagatggagttttgctcttgttgcccaggctggagcacaatggtgcaatctaggctcactgcaatctccacctcccaggttcaagcaattctcctgcctcagcctcccaagtagctgggattacaggcatgcgccaccaggcctggctaattttgtatttttagtacagacggggtttctccatgttggtcaggctggtctcaaactcctggcctcaggtgatccacccacctcagcctcccatagtgctgagattccaagcatgagccaccacatccgacaaccttatcatttttataagtgaattactgaaaaccttctaactgcagcaacctcccaagtattttccttgcttccacttttgtcctctctacttcaacctctatactgccaagtattctttctaaacatttcccccaaagaaattcttccatgatgctccactgccttcatctaaatgacttgagagtgaagatctgtcttaatgtgattctgactacctgtgcagactctctggctttcctctgcagaactctatgcattatccacactgtgctatattcggtgggtgggggaacctgtctgctcctgtgtactctacacatgccattttacctgtgtaggaatgctctccttcccaaccttagtgatataatgtatagttattcttacgtcttagcctagcaaccactttttaagaagagtttcctactctggcaccctttgctttcctttcctctgctcctcaggttcattaaagtgctcattctctccatgcacagtaaccagtattatcagagcaaccatgtcactgcagtgtatacaagtattttctcatctatctccccagtaagtcactcatcaaaggaaaaatagtatgttttccttatttatgaatcttctgaggtctagcccacagaagttgctcattatttaatagatgaatgataatgtactagattataaagttaatccataaggtatcaaaaataatcaaatcactcccaaacattccttagaacggtattacactggagaccaacatactgtcatctctcgacatagttaaacccaggacagttttctatctttggtacaataatatagtcttttttcttttattttctttagagacagggtctcactctgttgcccacgctggagtgcagtagcacaaccatggctcactataaccctgagttcctcggctcaagtgaacttcccacctcagctttcctgattaatttactaggactacaggtacacatcaccatacatggctaacttttttttttttttgacacgggatctcaccatgttcgccaggctggtctcaaactcctggcctcaagcaatcctcctatctcagctgcccaaagcaccagaattacaggcatgagccaccaggcctggccagaaaatagtttctttaaatgaacacctgcagttacaatgcactcaatgacattttatgtaagttttgtattttaaaacaccagagtttatattccatgaagctctatgcatggaaagtaggaagtaacaaggagtaaagaatagcaaatttatatctctcatcctaaggtcactctgtaaatacactcattgagaaattgagaaaaagagcagaataatcacatcatttaaatcaacttgtctatctcagctatatcttattgagcccacttctttgaattcatataaattacatgcaactatgatgaaattccattgtaccaatacgaccgtaagaagttagggctgatttttcacagccaacatttctttcacaattcactttcatcaaaaatttttagtgctccaaatacagtcatgcattacttaacaactgggatatggcctgagaaacttgctggtaggcagatatggtttggctgtgttcccacccaaatctcatcttgaactgtagttcccataatcccaatgtgttgtgggagggatccactggaaggtaattgaatcacagggctggttatctccatgctgttctgctgatagtgagtgagttctgatgaaatctgatggttttataaggggcttttcctcctttgcttagcacttctctctcctgctcctatgtgaagaaggacatgtttgcttcccctttcaccacgattgtaggtttcctaaggtctccccagccctgcagaactgagtcaattaaacctctttcctttataaattacccagtctcgggcagttcacagcagcatgagaacagagaatggactaatacagtacattggtaccacagagagtgtggtgctgctgtaaagatacccaaaaatgtaaaaacagctttccaaccaggtaacaggcaaggctggaacagtatggagggctcaaaagaagacagaaaaacgtgagaaagtttggaacttcctagagacttgttgaatagctttgaccaaaatgctgacagtgatatggacaataaagtccaggctgaggtggcctcagatgaagacgaggaacttactggtaagtggagtaaaggtgactcttgctatgctttaccaaagagaatggtggcattttgcccctgccctagagatctaaggaactttgaacttgaaggagatgatttgggggtatctggtggaggaaatttctaagtggcaaagcattgaagagaacgcggagaagaaaagtttgcaaaatttgcagcctgacaatacaatagaaaagaaaaacccattttgtggggagaaattcaagcccactgcaaaagttggcataagtaacaaggagccagatgttaatcaccaagacaaaggagaaaatgtcttcagggcatttcagagacctttgcagcagcccctcccatcataggcccagaggcctaggagggaaaaacagttttgtgggccagggccagggcccaaaagcagggccccccaacccggctctgtgcagccttgggacatggtgccctgcatcccaactgcttcagtcccagctgtggctaaaagggaccaatgtacagctcaggccattgcttcagagggtgcaagccccaagcattggcagcttccatgtggtgttggtcctgctggtgtgcagaagacaagaattaaggtttgggaacctccacctagatttcagaggatgtgtggaaacacttggatgaccagtctgctgcaggggcagagtcctcatggagaacctctgctagggcactgcagaagggaaatgtggtgttgtagcccccacacagagtccccactggggcactgcctagtggagctgtgagaagagggtcactgtcctccagaccccagaacggtaatctactgacagcttgcacagtgcacctggaaaagccacagacactcaacaccagcccatgaaagtagctgggaggagggatgtaccctacaaagccacaggggtggtgctgctcaaggccataggagcccacctcttgcatcagcatgatctggatgtcagacacggagttaaaggagatcattttggaactttaaggtttaatgactgcactattggactttagacttgcatggggcctacagctcctttgttttggccaatttctcccatttggaatgggtgtatttacccaatgcctgtacccccattgtatctaggaagtaactaacttgcttttgactttacaggctcatagtcagaagagacttgccttgtctcagatgagactttgaacttggacttttgggatattgctgaaatgaattaagactttaagggactgttggaaaggcatgattgtgttttgaaatgtgaggatatgagatttgggaggggccaggagcagaatgatatagtttgtgtccccacccaaatctcatcttgaattgtagctcccaaaatccccatgtcatgggagggccctggtgcgtaatttaattatgggggtggttaccactatgtgattcttgtgattgtcagcgagttctcacaagacggttttataagaagcttttccccctttgctcagcacttcttcctgtcaccatgtgaagaaggacatgtttgcttccccttccaccatgattgtaagtttcctgaggactccccagccctgcggaactgtgagtcaattaaacctctttcctttataaattaccccgtctggggcagttcttttcagcagtgtgagaactaatacaggcaatttcatcattgtgtgaacatcacagagtgacttacacaaacctagacaacatagcctactacacacctgggctatatggtatagcttattgctcctaggctacaaacctgtgcatgtttgtcttatcggactaccattgtgctatccatcattgacttcaacattgctacatggcatgtgacttatattgacaaacacataaaaatcacaagcataatcaagagcatgctaaacccctaactcaaattataattcaaggtaaactttctagagcatagactaagaagaagatgctattgttaattaaaaatcagtgaacaataagcataaattgagtaaaaattgggctagttatttcagcgaggccactaaaggagctcatcttagggcaaaaacttgatataaaaagatttgagtgtgctgccattttggtattatgaacttaccagagcttgcttacaaaaggccagtattctcacgctcaagtccttagatgccatacagatcctaccccactggctgagtcttggtatatgtgtggattgtgctagtgtgaattgtttacgtgtgtttattgtttcccttactttaaacctatttcaaaaatataactactatgtttaatactttttctacagtaattaagttttttgctttttttttttttttttttttttttttgagacggagtcttgctctgtcacccaggctggagttcagtggcgtgatcttggctcactgcaccctccgcctcctgggttcaagcaattctcctgccttagcctcccaaggagctgggattacaagcatccaccaccatgcccggctaattttttgtatttttagtagagatggggtttcatcacgttggccaggctggtctcgaactcctgacctcgtgatctgcccgcctcagcctcccaaagtgctgggattacaggtgtgagccacgacgcctggtcgttttctgcatttttataaggcatccctgggcagcataaatggcaaggtgaacccaaagcaaaaccaaaattaaacaagttgccacaaggataaacacatcaagcatagatttcctccccagtcatgataaatcaagaattgaaataatcctactatactccaagaactaaataactattttaaaatacatctgataatctaaaaaaaaaaaaattgtgaggttaaatatataaaattctatttcctactaaagttattaaatataaataacttttcattttctgtgtgtgtgtgtgtgtgtgtgtgtgtgtgtgtaccaacactgtaattacctacgcatgttaaaattatacaccacatacagggaggccgaggtgggcagatcacttgaggtcaggagttcaagactagcctggccaacatggccaaaccccgtttctactaaaaatacaaaaattagccaagtgtggtggtgcacacctataatcctagctactcgggagactgaggcatgaggactgcttgagcccaggaggcagaagttgcagtgagccgagattgtaccactgtactccagacagggtgatggagtgagaccctagagaatcagttcacttgcttcaaaatattaaataatacttatctatagcccaatccaaaacagaaattctgaagaaaaacaaagatatgctgaacaagaaaaataatgtaggagtattaatgctaaagaaaatcatctggctaatctgaaaatctgcttttagtgtaaaatttttttcaataatcatcaattaattaatctttaagtactccgggtttagaaaagaagtgcagatgccaggtagcgccctctaggaagctttccctcatcccaccaaagtcccaccatctatctatctgttatgatagaagtgataattatttcacacttagtattatttttgtaccctttctccagtagactataaactctttgagggcaagatctatgtttaattcagatttctatgccctagatatctaccagagtgccttccacaaagacttaatacatatgtatttttgaaataaaaagatatcctctcctaaatttacactttcagcttttttaacaaaataaactgtatactacatcaatttctatttttcttcctactcctcagtagttcctattttaccccttttagctaacttctcttatccctaatccctgagggaatgttcatccatttgttcacttattcattcaaataatccaatgaatatttgtgaagcaccaactatgtacaagcagtgaataagatgctagggttataccgtgaacaagcctcttagaaagctaacactttgatgggaaagacagacaagtaaataggtaattgtaaaacaatgtgaaaattgttactatagacatgaacacacaataccgtttaaaaaagagagacatttaatagtgtttttccaagtttttgtctgcggactgttttatctgtcttactgtttcccttggtcatccattcatccaaccatttatttgtctgtctactttcaactattagataatacatgtatgtggcacaaaacacaaaagatactgaaaaatacataaatgaaaagtcttcctcctatcttatccctggccactcagtttattttcccaaagacaagcactaatacccagtgcataatttcagagatactcgatcaatagacaaacatatatacacatgtttacggtctaattttattttaacacaacagaagtatgctttatactcgtctgcacctagtttttttaacttctattaatgcccatattgggctgtctcattctttcagatggatatagagattccactgcatgaatgtaactttatttaagcagactccttacgaatgctcatttaaaatgctacaatgctgcaatgagtatacttatctatatatcattctgtggtgcatctgtacgtctgtaggataaattcttagaaatgaaattgctgagtccaagtataagcgcattttaaattttgatagatactgatgtaagaggtttcatcaatttcatttccacccccataacttaaattataatctttatgggaatggctgccaaaactgcatccacagttttgactctttatccactctccatcatagttccacacatacattactttaaaagcttacgaaaaactgtttcaaaaccaaatttataaggttaacatgttcttcataattgcactgtatctgctaaggctcccaaattccaaccaaaaatcacttttcattgtacctttttgtttctaccaagatctaattaattggtcattaagatgtaacaatatggccaggtgtgatggctcacgtctgtaatcccagccctgtgaaaggctgacgtgggtgcatcacttgaggccaacagttcaagaccagcctaggcaacatggcaaaaccctatctctacaaaaaaatacagaaattagccaggcatggtgatgcatgcctgtagtcccagttacacaggaggctgtgatgggaggatagcttaagcttaggaggtggaagttgcagtgagcagagatggcaccactacaatccagcctgaatgacagagccagaccccatctcaaaaaaaaaaagatgtaccaatcctacagttccacaacatccattttcttcgtattttctcagacatcttactgcaagggcccagttctgtattcctgggttattattatttaattatcttgtcctatcatccaccagtgattctgcccatcccatcctctctgcctgaaacaacttcttacatcaattccctgggtgaaatctcattaagcctactctaagtgctagatcatccataaagcattttcttttatgactttattagaagttaggtctttcactatgcattctaatttgtaatacactaagggaagttatatactccttcacagcaaggataatatcttaacacattttcataaacccatactgcctaggcactcaaaatgtgtttaccaaattaatgaattaagttttgggttttgatttttttttttttatttgagaccaggtaatgctctgtcacccaggctgaagtgcagtggcatgaccatggctcactgcagccttgacctcccaggctcaagtgatcctcccgcctcagctcctcagtagctgggagtacaggagctgggtgtgtgccaccatgtccaggtaatttttttattttttgtagagacaagcttccactatgttgcccaggccggtctcaaactcctgagctcaagtgatccacccgcctcagcctccccaactgctgggattacaagtctgagccaccatgcaagccctgaatgaatgaagttttgcaacaaacgaattcctgcaaatcagataattctacaggaaaaaaattccataaaggatatttaattatttattttggaaaataagaatattttaagttcatgagacacaaacaagaccctatttaataattaaatttatttcagaaagcccacaataaaaatatttccagttagcttttccagtaaatttacttttccctcacattgactgtgatcaaaaccaaggaagagaaaggagaaggaataaaggaatgagtgaaatgtgctaataaaaatattaaatttatctccaaaatattgtcagtctcttaaatatagtcatggtaggcccggcgtggtggctcacgcctgtaatcccagcactttgggaggctgaggcagatggatcacaaggtcaggagatcgagaccatcctggccaacatggtgaaaccccatctctactaaaaatacaaaaattagctgggtgtggcggtgcgcgcctgtagtctcaactactcggggggctgaggcaggagaatcgcttgaacccgggaggcagaggtggtagtaagcttagattgtgctgctgcactccagcctgacgacagagcgaaactccatctcaaaaaaaaaaaaaaaaaaattatatatatatatatatatacacacacacacacacacacacacatatatacccacccatatatatacatatacatatatacatacatatatatacacatatacacatatatatacaccctcatatatacatacacacacacacatatatatatatatagtcatagtactctactataaagaagagaaaactcagccataatgtgcccatggactattgttccactgagtttagaatgggtaaaataacttttgaccatgttcacagcctacttgaaaagaaactttgtgaaacaataaatcttgtatttctggttttcaaaatttaataacatgatttcaaaaatcatacttctgttaaaactttttacatttaaaaacacaggaaaaagaagaatatgattatgctttccaacatataaatgtagttatataaaaacaatcattacatctcatcagaaataatttcgctcccatttgttcaatagtattaagagctacataaattcctatcaagaaatggagaactgctatattgtaacttgtattttaagtaatgtttttaaaataatgaaaatactaccatgcaaatactggatttacttcttgactcacctcgcccccattaacatattccatcacaaaacacaaacggtcttttgtctggaaggaatatttcaaggacttgaaataaaaaaaagaaaaaatgttacattataatcctgtattcttataattataatagtactaaaaatagaacacatagaaatagtaagcatgaaagatgaaaagaattgttattgtttaagagtttatttactacttaaaagtgcttaagagtttatgagaaacataaaacaaatgtttagttcacaataggtattattacaagaaaaactaaaattaaaatttcaagtaaaagtaaacttaattgcaacaagcacttctcaatctaatttgccattgatttgaagctgcattagtactcaaggttctcatccatgcaacctcacagcgtggccaacaaattacactagttgaagttccttaggaatgtagctacggttgttacactcaggtttctaatacaatgacaacatcactttttgcatattgagtgcacaacagaacccaacctaacagagttggtttatataattttgtaggttatatataggttattaaaaaatacccaaatgctatcttattacactagacaataaacacaccaaaaaaggtagcaaagtaagtctaggtatctactgacagctctgaaaatgtctatttcagatattccaaacagtgtaaagggttccactttggaaagtctagctattatttttcatctcaatatagttcattggaaccaagaaaatacagaaactttaccaattatccctatattacaaggaatctaagaacagaactaaaaaatccagtttctttcaagacaactaagttgtaggcataccatataatcagtttatactttgtctagtgaaaaaaacgtagcatggcttatcccacctctaatgtatttagcattcccatatttcttaaagtactctatccctcaaagaagtctcatttctataaaatatattcgataaacatttctgccttccatatttgaagaaatgcttctgatcattaagatatttatcagaagccaataaaacaaacataaaatctttacatttaagaaatttttaaaaatcagccatttcctcaatagtctccttaaaatgccagaggtaatgtattaactctatggtttgtttttgtttttaatggcaagagattcatgggagaaaaaaaattctcaaaaaagtaataaatgcataatgggaggaattatcaatgcatacacactgtaaaaatccatacattctaataagttataagaaatttgacttacgttctttccacaaagaaaatgagatatctaaatgaatagtatttttcacaatttaatttctaacataaaattccttaaatttcaaatgttacgattataacatctgtcctctagtcacttactgttaaaaagggatgtctagtgttctttaatactctgctttcagttagagtgtgtgccacttcatcctacaaaagaaaaaaagcaaaccttcaatatatgttttgagcactgataataataatttcactatttctctaaaattggaagaggttaagcccagagattgaaaaggattttaaaacacagtggcatgcttcctttaccactcagcattctctccaccaaaatacaaaaaaactcaaattaatgatttaattcagatgattgtataagttcatataaattcactcatacttaatcaaagtatatcaataatgatacaaaaatcagtcagaaaattatcagggacacagaaaattaaatattgagctttcctccttgaagggaacaatttatcaactaatatttctgcatgaggtaatttaatatctccatgtttgtaatacattttattcagggggatgaaaggatatatttcccaataaatatcaaagaatttaaaagtctcctactttaaataaattagttattagaacacagaatacacatgcaatatttagttctaaattacacattttagaaatagaaaggaacagagtataaaaatatatacctttctgcttgtggctttttaatttgcgtcttaatttttaaagccaagttcttgctctgttgcccaggatagagtacagtggtacaatcacagctcactgtaaccttgaactcctggactcaagcattactcctgcctcagcctcctgagtagctgggattacagatgtgaggcaccatgcccagccttatatgcttccttatttatttttttagagatagggtcttgctatgttgcccaggctgagctcaaactcctgaggatcaaggaatcctcccgcttcagactcccaagtagcagagactacaggttgttttttttcctttggttgggggcgtgggtgttacacatttttttttatttcaataggtttttggggagcaggtggtgttacatgaataagttctttagtggtgatttctgagattttggtgcacccatcacctgagaagcatatgctgtacccaatgtgtagtcttttatgcctcaccctgcttccatcctttcccccaactccccaaagtccactgtatccttcttttgcttttttgtcctcatagcttagctccagagactacaggtttaatgtgcttttcttaaaaaaaaaaaaaaaaaaaaaaaaagctcacaaccctcctactgtaggtgatcattttaaaatgtaagtatatttcaaaccaaaaataaactaagaatgttttccccaactttgggcataaatctcatattgatatcaaaagcaaactagtgttttcttcaacatatggagaactggagataatgtttcatatttcaaaagtaacactatcttaaagaagaaacgaaaggaagacaactgctgaaacgaacacagcatctctgttcttcacttctggcaagatcttaaataaagcccttgctgaatcaatttcttaacactgtcagaaaatcaaaattagatggaagaaagacatgaaaagcaaaacatcaggacactgcattatatttgttatctttataaaaatatttgaccttaaactcgaaagataatgataactagattaatcaaagaagctaagatcccacaaccattcaaagaaggtaagatcaattgtgtctgaacagaaagtataattaacaacgagtgaaggaaagcataaacatgaaatcatctcagtcttatttgttttataggagtcagttttaagtgctcaatttgaaagccaatgtcatatcgtactatagttcctaagttaattagaatagcaaacattgtaaaacaaaataaatcagaagcagaaatgacaccagaacttactgatttccatatacactgtgcctaacataatggtaagcatacagcagatacctaataaatgtctattgaactgaattgtgtatcataggaaagaattccaagatgtcaagtgtgcaagagttcattcatccatccacccacccacccacccaccgacttcttcaacacatatgcaacaagtatcttctgggtattcgtctgcacatcagagacaggacactgaacaaatagacaaaattctctgctctcatggagctttagttctacttacatggtgatcagtgttaatgggaaaaaccagagaaggggatactacagttaatgagcatcacagagggaatatgaaatacataattaagcattatacaagtggctattttgtgatatactgaaccaagtccattcacttaaaaaaaaaactgctgatgtgcactcactaattggtaagaacagtgctggtataaggtaacttaataaaaaaaataagatcccattgctcacagagttcataggctagtggaaaacacaaacaagtaaattatccaacttaaataattactctttctgataagtgatattaaggaaaaagtggaggttatccactattgtcaacggggctgtaagggagaaccaatgctattggtagagtgtaagttgggtattgtgatggtgtgggacatagagaaagtgatggggtgggggtgacatgtttgtgaaagtctactcacgttcttctaagaaggatcaattaggaaagcattacataaccccaagagagaagtgaggatggcttggactactatggtggcagcggaaaaagaaaaaggggatagttctgagatataaagttaacagtgctaatataaaagttacatgcctccaacatgagagtgaatcacagacattttaataggcagttcagaaagaaattcacagaagataacatctacctgttgtggtttaagatgttaagtgatctgggtcaagaaattaggaaaagactagagaaaagtatgtatgaaatttatttagaaatagaaaagatattctagtgctttgaatattttcagtggggtattacattctattttgttaaaacaggcttatcacgcataatagttatttttctaaatcacttagtaactttcatgagggaagacttttctaccccctaaatttgtaatctgaccacatccaaggaaccaagtaaagacgtatggaggcaaaagcaaaaacagtatttgttatgagaatggaactggaatgaacaccatgtacataccaaaatgtattttctaacatattttacagctgatcagattagaatttcttcccattaatgcatatttaatggtactgtatttcacatactaattagtttctgctatgaagataaggtatgcgcaagctaaaaagtaaacacagatgctaataatttttaattacagttaaaagcaacatgtcaaaacaaaaagttaaaaataacagtagtaaaacagtgactaaaacaatgtgatgccttttaaaaaatccatctgttgatcataattatgaagagttctagaaatgcttggggatacaatgtatttttttcatggaaaagcttttgaaatacaaatttacatatatttatccatggtaaaatagtaaataatgaacttttaaatctaatttctttcatagaagaattagggggaatgggattttatttcttcaggcagaagaatagtctttttaatattttattttcccaatcctctccaatttatcattcaccctctattacacacgatctaaagttctcctttcatttgaccctctcgatgttttgtggtaattaggttatttgagggaatgaggtgtaggagagggcaaacaagaggagaaaaagaaaatttctacccttaatgatcaagaacaccatgagtgtcatctcctttaatccctgcaccaactgatcccacatctaagttcaatagtaaaggtcatttctacttcacaaaactgcctcccatcttcaaacaacctactatctacttcactaggtactctgctcacattattttctccaaattgaccacaagtctagttgaaatcaagacacattccgtctaaaccatttcctccatccacccagagctataaatgagacctagaggaagacacgaatcaggtgggagaaacgggaagagggtagagaaatgttactttggcacatgttttttcgatacataatagttgtatacattttcggggtacatgtgttgttttgacacattccatatgtgtaatgaccaaattagggtaatggggatattcatcacctccaacctttaacttttctttatgctggagacattcaaattcttctcttccagctattttaaaatacacagtaggtggttgttaactatagtcgccctactgaactatctaacactaggtcttattacaactgtacttctgtacctattaatcaactccatctccccatccccctaccattcccagcctctaggaacaaccaatctactgtctatcttgatgcaatcccgttttttagctcccacataagaacaaaaatgtgcaatatttgtctttctgtgcctggcttatttcacttaacataatgggttccatttccatcaatgttgctgcagataacgtgatttcattctttttatggctaagtaatattccactctgtacatatatcgcatttatcctttcattcattgatgggcacttaggttgattacatattttggctgttgtgaatagtgctgcaataaacctaagggtgtagatgtctccccgatatgatgatttcctttgttttggatatatatatggtagttctatttttagtttttgaggaactttcatatggttttctatagtggttatactgatttacattcccaccaacagcataggagagttccctttagcatctgtgatttttttgtttttttgataaaagtcattgtaactggggtgagatgatgatatggttaggtatccacccaagtctcatcttgaattgtaatccccataatccctacatgtcgagggagagacctgctgggaggtgactgggatcagggggcagtgtcccccacgctgttcttgtgatagtgagtgaattcttaggagctctgatggttttataagtgtctgacagttcctcttcacacactcgccctttcttcgcctgataccacacaagacatgcctcttcccccttccatcatgactgtaagtttcctgaagcctccccagccatgcagaactgtgagtcaattaaacctcttttctttataaattacccaatcttgggcagttctttataccagtgtgagaatgaactaatacagatgatatcacattgtggttttgatttgcatttccctgatgagtagtgatatgacacacttttacaaattaaacaatgattaccagtgattattatttacttttccactgtctcaacaagccatatgttagcaatgtatacttttttttttcctgccagaggagacatgtcacacttatcaagctctaaattttgggttctaacttttgtttcttgaaaacttgagcactggcccagataatgacttctaatacttcttccattctccagctgtcagactgtcttctgttccttgatttctattcctttttttgaagatttctcaccttgatggagatgaaagcaccgttgttctctgttaactacaaacattattgcgcctttctcgagtattgtgtttgatactttgttcttgatgctccagttccaaatattccttagatgaaggccaaatgaactcctttgacttccatcatgatataatcactttggactccagtctttcttctgcctctctcatacgcggtattgggacaagttcatctctaccctcttaactctatatttcacatctaaagataaatttacacaaacatattgactaacaccattggaatctccctaaaaactcagctgaatcttctgaggcctctttcatccatcgctacttaggtcactcttcaatttctcaggatggttgtttcaaatctttcccaggccttcttccttgcctggtaggtatacttaaatgtacacactaacccttacctagtcaagctactaagctaagactagaacccaggtctgtgctgacttccaagcacaggagcttttcatttatttgtctctctttatctcagcctcactcgttcacactttcaaaatgcgatcttacttcctactcagaagagaagccataaacgtaacatttaacacatttgatcactccttcctcctgaaaacgtgttcttcttttgggtcccaggacatcctaatctcttcatcttcctcctcttcagtggttgtctttccgcagtctcatttgctgcttcctttgctctgaaacccttattctgtaagcatctccaggactcagtcctcagaattctcttcactgggtacactcttcctttggtaaactcattcagactatggctctaatacaggatatatgctgacagacttccaaatttatacctcaaatctagacttctttcctaaacttaaaaaatgcctatttggcatggatgtataatcagtgacataaactggagtatctaacaaaaatagcaaatttgacatatctaaaacctaattccaaatctccccttgaaaagtttctcctgcagtcaacttcaatgtagtgaatggcaataccatgctttcagttgcttagaccaaacatcttaacaatgatctccaactccttttttttcccactcatactctacattcaatctgtcaagcaatcctgttggttcttcatcaaaatacacccaaggtctcattatcatcactacctccattgctactaccctagtacaagccactatcatcaattatctagattactgctgcaattagcaaactatctgcttccaatccacagtctattgtcaacactgcagccaaagtgatactgaaaactagactgtgtaactacacggcataaaaatttccaaaggcttcccacttcattcacagtaaaagccaatatccttacaaacatcctacaccattcttgttccacaccatgctagactcctagctattcaaagaatgtgttagaatgtgctaagtaagctccctcctcagggccttctcaattgctatttccccttgctggaacattcttccttcaaaatatctaaaggacttgcttcctgatctccttcaaatgcttgctgaaatttcacctttcagtgaggccttccatagtcatgctatttaaaactgcattaagtccccaaaatcgctaccatcattattccttatttccctactccacttttctctgtaagtatggattagtttattacatactctatggtttatttattatgtgtattatttattctctaattgctgacttgaataaaatttcccaaaggagaggagtttgtcagttttattcgttcaaatggtcccagtgcctagagcagtacctagcaaataattaggtgttcgacatatatttattgaaataatgagtgaatgaactagtaaataacgaataaccttggtgcatgctgctgaagaatagaagctacacgaactacatgaaataactctagaacataaatcactgaaatcatactcccaatagaacaatgacagttgatgaaggtatagcagatcaaaccattatctgcttcctacaataaaccacaatcgttgatgcaatgtttaatacagaggttcaaaagaatatgaaagaagagaacaaagtaactggctgatcacgttaagagatttcagttaagatccaccagtaagaacttaagagtccaaggaaaaagagatgccagtaatcaagcaaacgcattgggttattttaatggacttacgtgcagaaaaagggtaacacatcaggcctgggttgcccaaactctacacattcccaaaaaagtcagtcttcagaactggcgccgttggccaactcctgggaaatgaattctgagcctctgaaatattctgcctggtcagagtatttttgtatgctggagatcttgggccacatggtaccagtttgactagatagtttatgcaaacaacaggatgcatgattaatacttcgtgcctgattttgctctgagaggttggaatctgagcatctcagggcagtcatgaaggtactgcttgcctatgtgactgacttccaataaaaaccctggacaccaaggctcaggtaagcttctttagttgacaacacttcactactgggagaattaaaattaaccatcacagatgcacttatgtgtcaacttgactggattaaggaatacctagagaactggtaaagcattactaatagctgtttctgtgtttccagaggagactggaatgtgaattgatggactgagtgagaaatattcacccacaatgtgagcagacaccatccaatcaactaagagcccaaataggacccaaaaaagcaaagaaaaggcactctcctggaatggggacactcctcttctcctgtccttggacatcagaactctaggctctctgacatttggactccaggctttataccagcaactccctagtttcccaccaaaacccaggttcctggcccttagcctcagactaagaattacaccatcagcttcccagggaacttggacggagatacgttaccagcatcccaaggtctccagcttccagatggcctgtcttgggaattttcaacctccataatcacatgagccaatttcccagtgaattctctctcatatatgtatatgtatccgattgtgtctgtctctctggagatccttgatttcaccacatcatccatgtgactccactggaagaagataccttaaagcttgcacttggtttctccaggattttgctctatgtggttttccctttgctgattttaatctgtacttttcactatcataaacaataaccatgagtcttttctgagtcttgtgagtcatgactcactgagcctgagagtggtcttagggacagctgacacagttgccatcataagtaggactcattaaagcatggcaaaaacattgtttcaaaaaaggaagaatgacagggcagacaatgacaaactctgatgcctaaatgggtatacagtcaccaatggcatgagacggcagctgtactgtgctgttactacatatagaagttgtcaatggaatttagaaatgacagaccaaaatctcaaggacttagatcactggatacataaagaaatgcaaaatgatgagaaacaagctaaatacacaatccactggtaacgtgtacttttttccccacatgtaagatttttattccaatttgatttgcatttcaaaggaaattataaaatgtatccactttttttaagacaaaaatttaattataaaacatgataaacttccaggttaaaattaggctaactgcttggaataacaaactcttaaatcaccattttccacctccacaccaagaataaccatttaatcaaccatactgtaacagcaggatagcactgagacttgagtaaagaggaaaactaaagagctcttccagctccaaatcatgaacatttttatgccttcttatagtggtgaacggcaaccacatcatcaccaaaagtaagtcataaccatttcaccatacttaatttctcttataaaatatgtttctttgtcatcccatttctgtatgtgaatgagtttgtctctgtccagactaacaacaaacttgcagtttctgtcatctgtagtggtttcatcaaactcttctcccagatggaaactaacctctgtgttcttgaacatactttgaatcctgatcaccaccttttgtcttcttcttgactgataatcactcttggtttgtccacatttcccacctgcctagtgacaaagcccatccctagagccttcatgtactcatcaaagttctgtcggtcagcttccaggtattacagaaagcctcctccacccttgccctttccccactttagagacagaagtgaggagctgctggtcttattgccactgcagtttgtgtttttttttttttttttttttttttgagagggagtctcgctgtgtctcccaggctggagtacagtggcatgatctcagatcactgcaacctctgcctcctgggttccagtgattctcctgcctcagcccctcaagtagctgggattacagacgcatgccaccaagccaagctaattttctgtatttttagtggagacagggtttcaccatgttggtcaggctggtctcaaactcctggcctcaagtgatctgcccgacttggcctcccaacgtactgggattaccaatgtgagccactgcgcctggcccagtctgctgtattttaaaacagctaaaatgaaagtaagagagagtgttaaggaaatcctgatgctcaaaaagcttggattttggttagcttgagctatggctgttagcctccaggataaacccaatggaaaattatgctgaaaaaaacagacagtatatctatggcctttgaccaccaggaacattgtccaaatggtgggtgacaaaaccaagacagtactggaagcaggggttatgtgtgaaggagttatcttgccttgtgaactggtattcatcgggttcctgaaaaacatttaagaaaatagattgtgagagtgactaacttgggagcagtatctttgattctgaatgttgcagaatgaagaagtctgcttggggttgatgcaggaaccttattactgaacaatcatggattgttgtacatgatccaaacacacaatagattgttcctaaagggacagctagtctggtggactgggtaaaagccactgtaaaatttgtttaccctgaaaagggaaatggtccttcccctcctttaaatgccaagtggcactcctccatagatgacatagctggtaagctgcatatgcaaaccatgctggattaacttcatggtcatcaggatgtttgttcatccttaatatgccctttaaatcatggtaaatactgtgactgaaggggccccgctaggcaggcatctgatataactgctgcaaaatctatcaatggtccaagaaatgtgtcagatttgttgtctcagcttcttaatatgggtcttacagatgctaagaaaataagactgaatcacaagtgaatgggtaacacaaaacagatagtcaacgaagtcccaagcaggatgaagttttaaacggttactaagagatgggatgaataaaatggacactgatgttaacacaaaggtcttaatgctgcactatcagaagttaggtttaccaatgggagcgcctcttagtcccccaacactgaagggccctaaacaaacactctatgcaccctaatttcaaagaatgcaccaagctgggaagcaaaaatgacaatgaagaacctcagttcaaatcatcagaggtgatgggctaccaaattaatcaggatgaggactgacacagaaccagggctttcttttaactaatctcctagtagggactgaaggccatatgcacacctgtaggtacaatagaaggtaaaaaagaaaccttccaggggttcctgacatagaattcagtgcctctgattccaaaacctattggtaaaatcctagcagaggcaataactagaaagacaggatatgaggatgaaatggctgataggattaaattaaaatttggatgaaaattagtatgtttgaatgaatcttggaagtacttgcatccacattacctgaatatgttttggggaaggatatgatgtttgaccagggaaaacttcagctactatactgcagaaagcttgttagttttcccttcagtcagaacaggctaaatgagaatctgtgcaacttccccagctcacataggttgttaatttgaaacagtatcatggtggaccaaaagagatttagcacatgaattaatgacatgttcgacactggagtgctgttaccaacaagttctgtgtcgtgcatgaaaaaggtgaattattcatgaaaactcacagcagataatcaagacttgaataatatagtatcatctacagcatcagcagtctctgacatggtttcagaagttctcaaaataaaacaatctaaaagagacatactcagccagacatagtggctcacacctgtaatcccagcactttgggaggccaaggcaggaggatcacttgagtccaggagtgtaagactagcctggacaacatagtgagaccctgtttcaattaaaaaaaaaaaaagagagagagacatactgattgatcttgaaaatacttttttcttggtcccaatctcaggaaaaaaacaactgcactttgccttctagtgggaatgatcccaatttatacttactgcagtgctgcaggtttatctgcatttatcagcttaccattataatttgtttcgaagggattctgacttgatacaggtccagaatacaataatatactacactgatgacattatgacggtatcagaaacctaagaacaagctagggctaacttgaaaatagtggtggctcacaggaataccacaggctggaggataaatccagcaaataccccagggtctaaccaaactgtgaaattcttacgaataacctgggcaggaaccacccataacattctacaggcaactaaaattaaattgctcttattacataaccatgaaagtaaacaagcagcattcactgcagctggtttgcttgagttttgcgaagaaaaattctgtatctggggactagtgctaaatccaatccgtaaaactacctgaaaggacacatatgaatggaaacctaaacaacagcaggctattatctaagttgcagtggctcaattaatgcctttgggtccttacgatatacactcagatatgattttagaagtatctgcaactcagactggagcttatggcaaaaagcccatgaatgctgtccagcagtaaccactgggaccatgggccagacaagaaagtatagaacacatcattagagagacgattattggtttgctcccgggcattaactgcaactgtctttatgactgaaggacataacataatcctaaaacctaaaatatccatgtcttgggtaatgtcagagaaacactctaacgagtaccaataacaaaatgaaaatggcttaacgggaatgtgctgaggaatgcaagaagacacttaccatattcaatagaagaaaacctttttttttttgagacagggtctcactttgtgtcaaccaggctgaatacagtgggggcaatcacaactcactgcagccttgacctcccaggctcaagcaatcccgcatctcagccaaatgagtagctggtatcaccagaggcatgccaccacacctggctaatttttattttttgtagagatgggagtctcactatgttgcccaggctgagtctgagtctgaactcctggactcatgcgattctcctgccttggcctcccaaagtgttgagactgcagccatgagtcatcacgcttggcctcctcttttcttccagatcaactttggaaccatctgtaaagctaccagatcctattgccacatcctactgttcaaatgctagtgtcttacaaagagctctcactgaccaccaaaaagtggcttgttttacagatgatagcagttcaaaggtaatcagccagcatcctgtttggaaggctgtcacactataactgactgatgtgaaactgatgaaagaacaacaaatcagctcaaagggctcaattgtacattgttctccttgcaatgatggatgaactaaacaaacataaccttcatgtgtggatgtacacccatgaatgggctgtggccatttgcctggccatatggtcaggctgacaggcagtgaaaaactagactattaaatggatgtgccaggcatggtggctcacgcctgtaatcccagcactttgggaggccgaggcaggtggatcacctgaggtcaggagtttgagaccagcctgaccaacatggtgaaaccccgcctctactaaatacaaaaagttagccaggtgtggtggtgaatgcctgtaatctcagctacttgggaggctgaggcaggagaatctcttgcacctgggaggcagaggttgcagtgagctgagtttgcaccattgcattccagcctgggcaacaagagcaaaactccatctcaaaaataaataagtaaacaaaataaataataaatggatgggtgattaatgaggcatggctctatgagaatcattatgggaatttaaggggtgaattaaagtaggacatgttgatggtcatcaaaagaacttctttcaggatcaggagatgactggaaccagcaagtggatgtcccagcatgcttgtttgaggtggctatctgggtccccaaaataagtagatatgggagatattggccgggcacagtggctcatgcctgtaatcccagcactttgggaggccaaggcgggtggatcatgaggtcaggagaccgagaccatcctggctaacatggtgaaaccccgtctctactaaaagtacaaaaaattagccaggcgtggtggtgggcacctgtagtcccagctactcaggaggctgaggcaggagaatggcgtgaacccaggaggcggggcttgcagtgagccgagatcgcgccactgcactccagcctgggcgactgagtgagactttgtctccaaaaataaaaataaaaaagatatgggagatatgcagcaatgcagacagagatgggctggccattgatatattcctcttgtaccctctgatgcacaaaattccagaaagagccatcctgtctgccagaaagggagaaagagactgcagatgactatggcatatattccccagaaaaaagtccccccactcccatatatagttggcaaatacactacactgagctactgccactatccccaggaagctataaatggtaattcttggaaatagacgtttacagtggattgggctttgcatacccaatggtagatacaaaagctcaaaataccgtaagatgactggaacagaaggtactgcacccccaccaagttacatgtcttcagaccaaagaatgtactttatagcccatacgccatactttacagccaatatccccagaagtctcaaccagtgcagtatcaagtcaaagtccaaaatctcatttaaatatcatcagctcaaaagtcccaagtgttataacccaaatcaggaatgggtgagactctatgcataatccaccctggggcaaaattcctctaaatctgtggacctctcacactagaaaacaagttatctgcttccaaaatacaatggtagaaaaggcctaggacagatattcccactcagaaagggagaaattggaagaaataaaaacatcactgattccaagcaagttctaaacccagcaagggaaattcgatttcaaggtctgtaactaatcctcagtaatttgtatttctgtcctctaggcccatggtggctccatcaacctctgcctttgcaaccctggtggctccatcaccctgtctctggcctccaattcattcttgcttttttttaaaaaaaaaattataacatgctttcagctgacatccatcaactataccatttcttttacactgacagggtttataacattttcagtctgttctgtaactatacttaagtcttcggtgctttgtctattgataaatcctaaaaactgaacgccaatttggtgtttccaatggtgtaagtaaatgaatattattcatgggacaatcaaatagtatggtcagacctgtaatgaaggaaaggttactctacatcaatagacctgggcttctcaagaaccaatgtttcatgtctcaaccaaatagcctcttttttttttttccatacaggcatacgtcaggttttgttccagaccaccacaacaaaagtattgcaataaaacgagtcacactaactttgtggtgtcccagtgcatataagttatgtttacactgcactatactgtagtctattaagtgtgtaacagcactatgtctaaagaaatgtatataccttaatttaaaaatacttgactgccaaaaaaggctaagggtcatctgagccctcagcaagttgttatctttttgctggcagaaggtcttctcttgacgttgatggctgctgagtgatcagggtggcagttgccaaaggtgagagtgggtgtggcaatttctttcttttttttgagacgaagtcttgctctggcacccaggctggagtgcagtggcacgatcttggtattcaagcaattctcatgcctcagcctcccaagtagctgggattacaggcacctgccatcacacccaactaatttttgtatttttagtagagacaaggtttcaccatattggccaggctggtcttgaacccctgacctcaagcgatctgcctgctttggcctcccaaagtgctgggattacagacatgagccaccatgcccagcgtggcaatttcttaaaatgagaaaacaatgaagtttcccatattgactttctcttccaagaaaggctttctctttcgcatgccatgctgcttatccacagcacaactttcttcacaatcggagtcaatcctttcacaacctgccactgctttatcaactaagtttatgtaattttctaaatcctttgctgttatttcagcaatgttcatggcatcttctcaaagagtagatcctatctcaagaaaccagtttctttgctcatccataagaagcaaatcctcatttgttcatgtttcatcatgggcctgataaaatttagtcctatcttcaggctccactgctaattctagttctcttgctatttctaccacctctgcagttatttcctccactggagtcttgaacccctcaaactcatccatgaagattggaatcaacttcttacacactcctattaatgttgatattctgacctccttccatgaacattcatgaagactgaatgtttttcaaggcatctagaatggtgaatctttcccaaaaggttttcaattaagtttccttggatctatcagcagaggaattactatctatggcagtaattactgtctattacaaaatgtatttcttaaataataagacttgaaagttgaaataatgggctgcagaatggacgttgataatgagctgcagaactgacgctgggttagcaggcatgaaaacaacattcatctccttgtatatctccatcagagcttttgtatatctggtgcattgtcaatgagcagtaatatttaaaaagtaatctttttttctgaggaggtctccacagcgggcctaaaatattcagtaaaacatactgtaagcagatgtgcttgtcatccaagctttgttgctttactgataagagaacaggcagtgtagagttaccataattcttaagggccctaggatttttgaaatggtaaaggagcaatggcttcaacttaaagtcaccaactgcatagccactactgagagagtcaatctgcccttggaagctttagagccaggcaatgacttctcctttctaaggaagtcctaagttcaactacatggaaaatctgtggtttcgtgtagtcatcttcaccaattatttagctagatatctggataacttgctgcagcttctgtgtcagcacttgtggtttcacattgcacttttaggctatagagatggtgtctttccttaaacctcacacgccaacctttcctagcttccaactgttcttctgcagcttccttacttctctcacccttcacagaattgggagaattaaggccttgctctggattaggctttggcttaagggaatgttgcagctggtttgaacttctatcaagaccactcgaactttttccatattagcaatgagtctgttttgcttgcttatcatcaaatacaagggcaccctaataagattatcgaagatttctcatcagaaacattgaaggccagaaggcaattggttgatacattcaaagtgctgaaggaaaaaaactaaagcaagaatccagcaaaactatctttcaaaaaatgagggaggtatcaagacatttctaggtaaacagaaactgagggagttcattagcactggacctgtcatacaagaaaagctatagtgagttatattaaacccttcaggtttaaatataaggacattagacagtcacttaaagtcagatgaagaattaaagatctggtaaagctaaatacacaaaaaaatataaaagctagtattactgtaagtttgtgttgtaataccactttttgctttctacatgattaaagagactcatacattaaaaaattagtagtcttgtttttggacacacaatgcataaagatgcaatttaaagacaccaacaattgaaaggagtaaggacagaattgtaaagaagtggagtttttgagggttattaaagttaaggtggtataaatttaaattacagtactataacttcaggatattaaatataacctatacaaagaaaatagctatagaatatacacaacaggaaatgacaagagaattaaaatgtttcactaaaaaatcaattaaacacaaaagaaggcatttatgtagaaaaggagggacaaaaagcaatgaggcatatagaaaataaatagcaaaaggaccgaagtcagtccttatcacgactcactttaaacataaatggactaaactctccaatcaaaagaaagagattgggaaagtcgattaaacaaacaataagaatgatccaattccatgctgtctccaaaagccacaaactgggtaaaagtgaaagagaaaaaattattacatgaaaatatagcagttccccttattagtggaggatatgttttgagaccctggtatttgcctaaaaccatggatagtaccaaactctataaagtcattccttgatatccatgggggattggtttcaaaatccccctgcagataacaaaatccacaaatgctcacttccctagtatcaaatagcatagtatttgcatataatctatgcacatcttcccatatactttaaatcatctctagattagttatcatatcagatataatgtaaatgttatgtaaatagctgttacaatacattggttttttaatttttaatatttttattcttgtattattatttttgagtattttaaatccacattggttgaatccatggatatggaatacagagagccaactgcatatactgtgtttttttcctacacatactacctaagataaagtttaatttgtaaattaggcacatcctttataaatggatattaaaagtagattaacagctactattaaaagtaaattaacaacaataataaaatagaaaacttataacaatatattgtgatacaagttattgtgatgcatatggtctctctctcaaaatatcttattttactatactcatctatatttaggctgtggttgattgggggtaactcaaaccatgaaaagcaaaactgcagctaaagggggtactgccatagtaaccaaaagagaaaaggggtggctatattaatatcagacaaaatagactttaaatgaaaaggccagaaaacaccaaaaaaagatattattaataaaagttaatacagcaagatataacaataataaacacttacatacctaataacaagaccatcaaaatatatgaggcaaaaattgaaagaactgcagaaagcaatgaccattttacaataatagttggagatttcaataccctacactctcaatgatgaatacaacaaccagaaagaaagaagtaaggcaacggaagacttcgacaactcaataaagcaactaaatctaagacatatacacaaaatgctctattaaatatacacaaaatactctacctaacaacagaatctacagtcttttcaagtgcataggggacgttctccaggatagatcatatgttggattacaaataaagtctcaataaactttaaaagacaaatacaaagtatcttctccaactacaacatgaagttagaatataaagaaaacaagaaaattcccaaatttgtagaaattaaacaacagacacaatcaatgacaaaggaaattagaaatactttgagatgaatgaaaacaaaaatacgacagactaaaatttatgggatgccacaaaaacagtgctaagggagaaatttaaagccataaatgcttatactaaataagagagattgcaaatcaacaatctaactttataacttaaggaactaggaaaaaaataaattaacccaaagcaagcagtaggaaaaaaaaataaagattaaagcaaagacagataaaacaaagaaaagtcaacaaagccaaaagttggttctttgaaaagattaacaaaattgataaacccttagcttaactaagaataaatgtataaggaatgagggaaatagaaaatcaccattagaacacaacagtaataattattatgggcaaaatccactgatatgggtgttaaaattagtacctaaaagtttaagaaaaaataggttatttatatagtcccagagtatttcctctaagatactgattacttatgaatggaaaaaatagcaactttaaagtgaagaaacacagtagacaccactgtagtcaagcaatcaaaattaacatcaccagtaaaaagatatcaaaatcatttcttccctgatatgttgctctgagaagggcacagcaggaaccaaaccccaggtcttgtcacactccaaatcttcatagtgttaatcatcttgctataaatgagcatattttctttcaagaaacgataaatagatttgttgggagaaagcagcaaggcactacttcaatcagaatagtctatcatttgtgaaatatacgtagttctgtacagttactcagaaaagtgtaagtagtgagataagacagtgtctaataggatattccccagtctgatgaacagaaattaaataatgggatacaagtgaggctaatatataaaagaaaaaacagaatggaatagatatttactgatgcttgatacacagtaggtagtaataatacacagtaggtagtaataatagtaataataattatagcaaatatttataacaatagcatattttaatttcatttgatttgtaatttaatttgttaagtttatttaatactgatggcatgtactattatatttatctattcatttaaccctgaaaataaccatatgaggcaggtactactattagccccactctgtagataagaaaataaaggcataaaaagttggatcacttactaagcagcaaaacctacctgacattatactacctcccagaaaatatcagcttaattaataataagtgccagctaggatgctaaataccttacatatcccaatcctcaaaatattcctgtccagaggttttattataccaatttaaatgaaaaaaactaaggctctgattggttgcccaacacactgcaagatattgagcacattcggcttctacctggtaactgtcagaagtacccctcctcctcagttactgtgataagcaaatatgtgccccccataaacatttccaaatgcccctaagagaccagtacttccccaaagtactgctttaaaaagtactggttgttaaagactattaggtgagtagtgaacctaggtgtgtatgattccaaagccaatgttctttccaataggggcattgacttgtaaaggagttgaggtcaaaacaaatgtacaaagacagggaaacaaagtttcacaaagtgtaaggggcaatacactccagatgaggaaactatagtagcaaataactggaagttgaagtagtccataaagtataacagtaatttatgtcatttgttgaattaagtaagacttaaagcatggaccaatttgtaaagtgtatctcctgagggaattgggattttgttcagaactctgagtgagaactgacatcattaacatgttatttatttaaaaaggtctaagctgaataaaggtatgggggtgggaagtaagtcttcctaaaataatttattttaatttcaccattctagtattttcaaatctatttaggatgtttttccattcaatgttatataagctttagaatttatgagtaaaaatcatctacactagtcaatcttaataagaaattcagaacgataggagaaattattaaaaagcaatcctagtataattatgatatagatcacaaaacattctcccaaacatgcaaacataaacatttctatttccttaagagaatagctttagtatataatatacaaatattatgaatgtctgaaaactttaaaaattacaaatattaatacacaaaaattactgtagcagtagtctacaaccatattttggttgtttaatggaatttgcatacattagcatgtaaattcatgagcccacaaacacatgcacactgcaaacaaaaatttagtaatcaactttaataaatcagttacctttgcaataatgacttctttcttcagaatcttcatagcatagtattttccacttgccttctctcgaaccaaaataactttcccaaaagtgcctttacctagtagtttcaaatagtcaaaatcattcattgtctgaaaaatacaaattaaaaaatataatatgaagtatttgatgcaatttatttgttagcatatatatatgtgtttgcaatatccactcaaaaccaaattttaccaatttataagcacatttaaatgaaaaagaatcagactggcattggctgtctcattagcaaccatggatgctgaaaataatttaagcagttctcagatgttggagaaaatgattttgaacctagaattcctcagcgaaattatcagttgtgtaaaagggcaaaggaggaaaaaaattattttcactcatttttaaggactcaagttttcaaggatttagtagtgctgctacccccagaaaatgtgataatcaaaaatgttccacacaaacatttccaaatatgcctaaaaaagcagtgctttggaaggagctatctgagaatttactctagcaaaataaagataaaatccaagaaagagagagatataggatatatttataagaaatgtcgagaacctcgtatacttcagttaaaataaatcaaagaaagcagttgttattcctgagagagtactttatgcaattcagaacagcaaggaagggagctctaagaagaatatctttaattaatgtgcctgttttcagtttcacttctctttcttaagtcaggtaatcctgaggattttgccagtcacacgtgccacttgttctctacagtcccctctatgtactcttttcctgctctgctctatcaacattcttccagaaacttccaaacttttgaaggcatttgtgccctaatgcccctccccgacccagcttttcatttttgtggacttgcctccttttgaaattcctttactttcatattaataggtttttgaagagaagagaaggtaattgtatatgatcagtttacataaatttaaactcagtttagaggtttataaatatcaaataagtatttgggttttatcttgaaattacaagtcactgaaaattttagtgccttttataactttttttttctgtttatcatttatctaaagtaaacgtgagaaatatttcaaatcaattgtttcagtttccaccttaacaaacttaaaaaaaaagcaagttaacccaaaagagttagaagaaaatgatacagatcagagcagaaatcaattaaatttttaaaagaaagaaaaagagtagagaaaaaatcagtgaaaccaaaagctagttctaaaagatcaataaaaattgataagcctctggccaggttggtcagaaaaatagagaagacacaaattaccaatatcaggaatgacagaggtggcatcactacagattctacagatattaaaagaaacgtaagagactattataaatggcattttgacaataaaattgacacctttgatgaaatgaacaaattgcttgaaagtctcaagctttgaaagctctttctttgaaagaaacagataacttgataaccccatatttattaagaaaaattgagtctgtggttaaatacctttcatcaaagaaaactccaggcccagatggtttcactggtgaattctacagacatttaaacaagaaatgacaccaattttatacaaattctttctgaaaattaaaatgaggaatacttctcattcattctgagacaagcatcatcctgatactgagataggagtttggcaggtctcctttcacaagatgcaggtcacaaagaccctgctggtaaaacaggatacagtaaagaagccagtcaaaacccaccaaaaccaagatggtgatgaaagtgacctccggttgtccccactgctcattatacattcattataatatattatcatgccaaaggaacctcccatcagtgccatgacagtttacaaatgccatgacatatcgggaagttaccctgtatggtctgaaaacgggggaaactgtcagttctgggaattccctgccccttcaccagaaaactcaggagtaatccaccccttgtttagcatatgattaaaaaataaccacaaaaatagccaaccagtagccatcagggctgctctgcctatggagtagccaccctttcattcttttactttcttaataaacttgctttcactttattctgttgtttgctcttgaattccttcttgtgtgaagccaagaacccatgtggtctcccaggctgaaccccaattttttgacaataccaaaatgagaggaaaacaatgcaagaaaactacatcccaatatctctcatgtatattacataaaaattcttaaaattttagaaatgcctacgttcactttcaacattttttgctgctcatattttttataattttccccaaatgtcaaattaaagtgtcttacattcaataatatctctagttcaaagataaagtagcaaagagatagcagggaaaataataagatatattaattcaactaaaaatcaaacatgtagctctaaatatcaaatatagtaaatcagctagtgtcatttgaacaaataacaggtaatattagatttaattgcattaatagagcagaaaaaatcagggaatactacataacaagctatttgtgctaggtagtctgcaaagatggctgccacaaattcccatttctccctgtatgcacattccactcttcccatgaaggggtggagtcaactttctctctccccgggctaaccctgtatcttgctttgaacacagaatatgatcaaactgatactatgccagtaacagacaaagcctttaagcctggcagtttatgcgttctctctcttggaaagctctagaaagccagctctaatgctgtcagttagtccatattatcctgctggagagagaggccatgtggagagaccctggaagataaattaccactccgagagagagaccaagtggaggagaaccaagacaccatagccaacagtcagcaccaaggccccagacacataaggaaggttttgttggattttccagcccacccatgtataagctgtaggcagctgattgagagccatgcatgcaagaccaacagagtggcccaaactacaaaatcatgagatatttacatggctattgttttaagacattaaatttgaggtagtttgttccacagcgtgagggttaatactgagtgtcaatttgattgtattgaaagatgcaaaatattgatcctgggtgtatctgtgagggtgttgccaaaggagattaatatttgagtcagtgggctgggaaaggcatacccacccttaagccgggtgggcaccatctaatcagctgccagtgtggctagaatataaagcaggcagaaaaacatgaaaaggctagactggcttagcctcccagcctacgtctttctgctgtgctggaggcttcctgccctcgaacatcaactccaagttcttcagcactgggactcaaactggcttccttgctcctcagtttgcagatggcctattgtggaaccttgtgatcgtgtgtttaatactccttaataaactccatatatatgtgtgtgtgtatatatatatatatacacacacacacacacgcacacacacacacatacatatatacacacatatatatatatatattattaattctgtccctctagagaaccctaatacacatggcaagtaactcagaaacattattttcataaccaggccagagtgtcaatttattgctcaaagtttcatttggacagtatgttcctcatttttttatttaaaagcactagaaaataatacttgctgtgccttattattaaatatcatagaaaatgaaattgaattattggggggtaaaaattagaaaacaatctgtaaaatgctttatgacattttcagttgaaaacaatatttaattataaaatattactatattccttaagaattgcaatccttattcttggctgggcgtggtggctcacacctgtaatcccacaatttgaaagaccaaggcaggtggatcacttgagtgcatgagtttgagaccagcctgggcaacatggcaaaaccctgtctctacaaaaaaatacaaaaattagccaagtgcagtggcaggtgtctgtagtcccagctacctgggaggctgagttgggagaattacctgagcctgtgaagttaaggctgcagtgagtcacgattgtgccactgcactccagcctaagtgataggagtgagaccttgtctcaaatgaaaataaataaataagtaaatagtaaaattgcaattcttaggaacaatgaggctaaaaaaaaagtatgacagccttcactgaacttcacagcttgtcagtttgactctcaatctttaaaaaaaagggaatttacatggaaattactattagttaaaaagcactgtatgtgataaaatcagaaacagatttcccatctattttgacagaacttcaggaaattaaaaaggtatttttgctatcaaatgctcatggtcagaatggtatacacagtaattgtgtagtctttacaaatgaaatgtacactattacaaaatgttttggtcttctggatgatgttatggaaaaagatacagtaagtccttttttttgtttgtttgtttgttttgagacggagtctcgctctgtcgcccaggctagagtgcagtggcacgatctcggctcactgcaagctctgcctcctgagatcacgacattctcctgcctcagcctcccgagtagctgggactacaggcgcccgccaccacgcctggttaattttttgtatttttagtagagacggggtttcaccgtgttagccaggatggtctcgatctcctgaccttgtgatccgcccaccttggcctcccaaagtgctgggattacaggcgtgagccaccacgcccagccacagtaagtctttaataaaaatataggagtatgaatactctccagaaaaataatcctcctccaaagcctgatcttaagaatttattggggaaatactttacagttacactcttccctttacatgtttacgtggctgttttaggtaaagagatacatgggcatatataacaaatgcttaataaatgtgttcaaatcaggcacaccagaatataagacactgtctagcccacaaattagattaaaaataaacatataatcaatgaggaacataaagaacttccaagaataccacagtattagcatatttggtcaaaaaaagataaattccagatacatttacaatgtaacagcaaaaccaagtaagtagaaagaggaaaagagctctgacgaagttcactcctttgcctccatctctgcccacttctcctggtgctctttctcacgggaagaggtggagctaatgttattagtcaacttctacattggttacgtcgcttctcccttttaaataagcagattcatgcagtgtgagatcatgagatttcagcaggtctggccattgttctttttttccttctctttttctctggatactggccactggtatgagttactacagccaggaattaggtgatacaatcccaagaactggagtcaaacttagtgggaaagcaggaggcactgcttatactttaaacgtaaatcatgagattatagccagttgatcccagagaagcttatgctagtctgttaaaaattaagcagaattttgactctcacttggctttttatccttttatgctatgccccttcacatacttgacaaggcatacaagaatggtagcttggctgaccaagattaggcacttctgggttctctaagcaaattcctctgaaacgctatcttttaattaaaacatagaaccacattttcttttaattcaaacaaagaagagcacttaaatctgtctgtgaggcccttgcctctttacacccaacatccttcctttccaattgagtttttaactggcagagcagacactgtggcgataatccaccactaagggaggtaacgaaccctatttcatgcaagaaatagcagtctgacaactgtcaccatagccatcataatcagtacctattcttttaatcctattgccatttggcaaaaattaaagaaggaaatgtatcctataaattattagaataatattcttatttcacaatgtgtggttatagtcttaaaaataatccaaacttctgcaattctttgcatgataattgatatacataagggtatagttctagaatcatttatcttatgaaaatgacagtaatattttaccacttgaggctaagtcattaggaccgttatggagttagtagtggtacaaatgttctttttctgcactaacttctgcagtaatttagaactattttaaattatttcaaaaaagttaacagaacttcaaacatataagatcttttaattgtatactgtaacacgtcaatatacagcttatttctttttcttggttcatatatcttgagcctctctaatctctataatttttatgcttataatgaagttatattagaaacaaaattatgcagatattctcttatgactatactctgtttctcaaaatattatgaaaaactgttgtccttatatgacatttggatattagttaatttcaattgataataaagcttgtaaattcttgaaaaaaccagtagaactttactatcacaacctagtgctagaaagggaggagttcagatcttactgcctggggttaagtactggctcccaccctgtgtgtaattaaggggaaaatttcttaatccttccatcctttatttcccttaactataaaacaggaataataatggtacttaacttatagttgaagttcaaaatgaaaaaaaaaatgtttaaagtgtttatgtaatacgtgctcaataaatattagctattaaagttagctactattctttgtccacataaagataattaaacataaacatcactctaaaacatcttctcttagaattttttactccaactgagtctccaaaaagaaaaatccatagaggtattttgaatttggggttcaaatacttaaccatatcagatttacactattcttcatttcattttaaatgaaataatttacacatgtacaaaagaagctttcttatctctgagtaggtaggtgggtgtagctagactttgtttttctttttgcaatgatggaggaacaaggcagattaaattgacgtaaaagaaaagagggattcagttcaacaaacaaacagagtagaaatctacaatgaagacagaaagggatctcagacatttggcccagatcaagtatagaatattattcttattcacataaggaaaggataattaactttatgttgtgagtgtgtaacttcaccaagtccacaagtttaacgtggaaaagggaggatatgaactcaggcagtctatctccaaagagttcttaatcactgtgctaataccaaatttcatggataataccttgaaaatttgtgttttcctccctgaagattaatttacaacctattaaatcaaacatattctaaagtgataaatggcaagcttatctcaacacctctatctttaatcatgaaaatatcatttttgtaataaggaaattgcttttcaattttctattgcaatgaaaaaatttatattgctcataaaaatataaattcgtacttattatgctggaacactgagagaaggaaaagtctatttccctactgactcagaagcagccattaaataagagttattgtttccaagattgttcactttcctgctgactttactatgactgagggcaccaatcaggaagtacatccgagccattactgctcgtgcttttcgggagaatacgaaatgcgaaatggaaaagaacaaatcatcagggaaaacattttattacaaagtttctaaaattgtattaaaaataataaggaaaaaatgcaaattataaagtagtgtgatggcacatcagtcacacatgagccctatcagcattcagtgctaaagtgctggatcactgaaacaatgttcacctatttggttttaaacaacaacaggtatttcagattcatgtgaataagacccaccaatatatttacatatcgtaagaaaactggctgacatctttctgcaaatggtagcttttaatatgtttcttccagacaaatgaatgctgtgctgggaataagttattattttctacctttcttttatgatgggttgtagaggcatccatctcttcctctcctatattatcaatttgtgaagttggactacaattcattctctcctcttcttgcctctgcagtctgtctgctacagcctggatagcttctgtccattcttccctataaaaatgagtaaaatttcccattaatagaagatggtaaatgatttaaatattttccttttataaactatgaaatcaatacaaataaaatctattcagagatcaaacacactcaacacagataagcatacactctcaccatcaccccaaagtgaaaataatcctaagagcatttcattcaccacatgcctaaagtctgtagtagcattttttggaagtatgttaaagaaaaaaagagaagaaaaaaattgttgaaaactcgagttaaaatcatttacatgaaaagttaaattttatttgtctgtacatatatatatcctacttttttttttttggaaacggtctcactctgttgcccaagctggagttcaatagcatgatctcagctcactgcaacctccacctcgtgggttcaagtgattctcctgtctcagcctcctgagtagccgggattacaggcgtgtgacacaatgcctgactaatttttgtatttttagtagagacggggtttcaccatgttggccaggctggtctcgaactcctgacctcaagtgatccatccgccatggcctcccaaagtgctgggattacagccatgaaccaccgcacttggccaatcctaactattaagttgaccccctaaaagtttgctgcagtttttagaagtgttttgcttagctattttaagtccatcattgacatcctgaagatttctatgaggtccaacagacattccaaggaaaggttttcaaagccaaaacctttcattgtttccagatcatagtaaatttcttagaaaaaattaaaaaaaaggatacagcttgtagtttgaacaatcagtctcaggagcatttatatcaagcatttattttttgacatttggttatcagaccaaggatcattatttttccatgtgaattttaaaatcagcttgtctacttcttaaagtctatttggattttgactggaattacattaaatctatagatgaattttgggaaaactaccatcgtaatcatttaaatcttccaatccatgaacatggtatagctctacatttatacaggtctttaatttcccaatgcaatgtttgtaattttctgtgtaaagatctttcacatctttaactgaatttattcctacatacaatcatgcaccacataacaatgtttcagtcaatgatggactgcatatacgatggcagtcccctaagattattacactgtatttttactgtacccttcctatgcttatatgtttagatacataaatacttaccattgcattacaattgtctatagtattcagtacactaacatgctgtacaggtttgtaaactgtgagcaacaggctacaccaaatagcctaggtatggggtgggctataccatctaggtttgtccaagtagtatgtttacacaatgttcctaatgacatgtttctcaaaacgtatcactgtcattaagtgacacaagactgttcttttatgctattgtggagggttttatttcactttctaattgtacttattagtatttaaaaatacaattgatttttgtatattgactttgtatactgcaactttattaaattcatttattagttccagtcactcttatttttctgcattttctacacatgcaaccatgtggtatgcaaacaagagcagctttacttgtttccaatccgtatgctttttacatctttttcttgctttattgccctagatcagacctgcagtacaaagttaaatgaaagtaaacagcagcatacatgctttgtttcacaagttaggaataacattgttttcatcccccttgaatattatgtaagttgtagatcttctatataacatttacttaatcaactaagttctattctatttctagccatctgcatatttttaatgaaagtttgttgaatttttgtcaaatgtaggccaggtgcagtggctcatgcctgtgatcccagcactttgggagactgaggtgggcggattacctgaggtcaggagttcaagaccagcctggccaacatggtgaaacctcgtctctacaaaaaatacaaaaattagctggatgtgctggcaggagcctgtaatcccagctactcgggagactgagacatgagaatcacttgaacccaggaaatggaggttgcagtgagctgaaatcacaccatggcactccagtgagggtgacagagcaagactccgtctaaaaaaaaaaaaaagaaaagaaaagaaaaagaaaataaaactgtcaaattctttttctgtatctctataaaatgatcacacagatttttaactttatcatattaatatggtgaaattagcttaatagtttccagatgttaacacaactttgaattcttgggagaagctccatttggccacataacttaagcttttatgctttttacctattgtttaatttgttgatactttgttaagaaattctgcatatgttcacaagtgtattgggctatagttgtcttttcttaaaatagttctgtctgatttctgaaatgagggtgacagtggccttataaaataagttgagaagtactcccttctcattattttctcaaacagcttgtagaggattggtcaaatttctaacttaaatgtttgacagaacgcaccaataaggctgtctgggcttggaacctttgaggaaaggttcttaattactaattcacttccattcattgatattgggttttctaatgttttcttggatgtcagtaatttgtgtcttccctctttttcctttaacaataccccaaaacgtttttcaattctattaatttttttcaaagagtacttttggttttattaattattctctactatttttctgttttctatttcactaatttctgattgctgttgtttctgttttcttttggtttatttttctggtttcttaagatacaagcttaagttaacgatgtgagaaatttcttcttttcaaatacaggtatttaaggctacaaatttccttctaagcattcatttagctacaccccacaaattttgatatgtattattttcattattgttcatttaaaattattttctaatggctcttgtgagttttttgacccaatgattataaaaaattatgttaatttccagtaattgacatctattgtcttactgttattgatttctaattaattctgtggattacagaacatacaccatataactttcatcttccaaaatgtactcagaattattttatgaccaagaatatgttatgtgtatatgtgtgtgtgtgtgtgtgtgtgtgtgtgtgtgtgtgtgtgtgtgtatgttgggtgtgtgtgtgtgtatatatatatgttatgtgtatatatatatacacatacacacatacatacacactttaagttctggggtacatgtgcagaatgtgcagttttcttacatgggtatacatgtgtcatggcggtttgctgtgcccatcaatccgtcacctatattaggttatttctgctaatgctatccctcccctagcccccaactccctgacaggccccagtatgtgatgttcccctccctgtgtccatgtgttctcattgttcaactcccacttatgaatgagaacatgggatgtttggttttctattcttgtgatagttggttgagaatgatggtttccagcttcatccatgtgcctgcaaaggacatgaactcatccttttttatggctgcatagtattccatggtgtatatgtaccacactttttttatcccgtctatcactgatggacatttgggttggttccaagtctttgctattgtgaatagtgccgcaataaacatacgtgtgcatgtgtctttatggtagaatgatttataatcctttgggtatatacccactaatgggattgctaggtcaaatggtatttctagttctagatccttgaggaatggccacactgtcttccacaatggttgaactaatttacactcccaccaatagtgtaatagcattcctatttctccatatcctctccagcatctgttgtttcctgactttttaatgattgccattctaactggtgtgagatggtatctcattgtgttttgatttgcatttctctaatgaccagtgatgatgagcattttttcatacatttgttggctgcataaatgtcttttgagaagtgtctgttcatatcctttgcccactttttgatggggttgttttcttcttataaatttgtttaagttctttgtagattctggatattagccctttgtcagacgaatagattgcaaaaattttctcccattctgtaggctgcctgttctctctgatgatagtttcttttgctgtgcagaagctctttagtttaattaaatcccatttgtcaattttcgcttttgttgccattgcttttggtgttttagacatgaagtctttgcccatgcctatgtcctgaatggtactgcctaggttttcttctagggtttttatggttttaggtcttacatttaagtctttaatccatcttgggttgatttttgtataaggtgtcagtaaggggtcagtttcagttttctgcatatggctagccagttttcccaacaccatttattaaataggggatcctttccccattgctttttgtcaggtttatcaaagatcagatggttgtagatgtgtggtattatttctgaggcctctgttctgttccattggtctgtatctctgttttggtactagtagcatgctgtttttgttactgtagccttgtagtatagtttgaagtcaggcagcatgatgcctccagctttgttctttttgctcaggattgtcttggctatgcgggctattttttggttccatatgaagtttaaagtagttttttccagttctgtgaaaaaagtcaatggtagcttgatggggatagcactgaacctataaattactttgggcagtatgaccattttcttgatattgattcttcctatccatgagcacgggttgtttttccatttgtttgtgtcctcttatttccttgagcagtggtttgtagttctccttgaagaggtccttcacataccttgtaatttggattcctaggtactttaagctctttgcagcaattgtgaatgggagttcactcatggtttggctgtttattattggtgtataggaatgcttgtgatttttgcaccttgattttgtatcctgagactttgccgaagttgcatatcagcttaaggagatttggggctgagacaacggggttttctaaacatacgatcatgtcatctgcaaacagagacaatttgacttcctctcttcctatttgaatatcctttatttctttctcttacctgatttccctggccagaactttcaatactatgttgaataggagtggtgagagggggcatccttgtattgtgccagttttcaaagggaatgcttccagtttttgcccattcagtatgatatttgctgtaagtttgtcttaaatagctgttattattttgagatacattccatcgatacttagtttattgagagtttttagcatgaaggggagttgagttttgttgaaagccttttctgcatctattgagataatcatgtggtttttgtcattggttctgtttatgtgatggattacgtttattgatttgtgtatgttgcaccagccttgcatcccagggatgaagctgacttgatcgtggtggataagctttctgatgtgctgctggattcagtttgccagtattttactgaggatttttgcatagatgttcatcagggatactggcctgacattttccttttttgttgcgtctctgccaggtttcaccaaagtcaaaatgtaggaaaaaatgttgagggcagccagagagaaaggtagggtttcccacaaagggaagctcatcagactaacagcggatctctctgcagaaaccctacaagccagaagagagtgggggccaatactcaacatccttagagaaaagaattctttttttttttttttttctgagacggagtctcactctgtcacccaggctgcagtgcagtagtgcaatcttggctcactgcaacctctgcctcctgggttcaagagattgtctgcctcagaatcccaagtagctaggagtacaggtgtctgcccccatgcttggctaatttttttgtatttctggtagagttggggttttgccatgttggccaggctgatctcgaactcctgacctcaggtgatccacccgccttggcctcccatagtgctggaattacaggcaagaaaagaattttcaacccagaatttcatatccagccaaactaagcttcgtaagtgaaggagaaatagaatgctttacagacaagcaaatgctgagaggttttgtcaccactacagggcactaaacacgcaaaggaacaactgataccagccactgcaaaaacatgctaaattgaaaagaccatcaacactatgaagaaactgcatcaactaatggtcaaactaaccagctagcatcataaagcatcaaattcacatgtgacaatactaaccttaaatgtaaatgggctaaatgccccaatgacaagacacagactggcaaattggataaagagtcaagatccatcaatgtgctgtattcaggagatccatctctcatgcaaagacacacacaggctcaaaataaagggaagaaggaatatttaccaagcaaatagaaagcaaaaaaaaaaaaaaaaaaaaaagcaggagttgcaatcctaatctctgataaaacagactttaaaccaacaaagatcataagagacaaagaaaggcattacataatggtaaagggatcgatgcaacaaaaagagctaactatcctaaatatagacgcatccaacacaggagcacccagattcataaagcaagttcttagagacctacaaagagacttagactcccacacaataatagtgggagaaagagacatgaaaaaacccttcaaaaaaaaaatcaatgaatccaggagctggttttttgaaaagatcaacaaaatagatagacctctagccagactaataaagaagagagaaaaatcaaatagacacaataaaaaatgataaaggggatatcaccgtcaatcccacagaaatacaaactaccatcagagaatactataaacatctctatgcaaataaactagaaaatctagaagaaatggataaattcctggacacatacaacctcccaagactaaaccaaggagaagttgaatccctgaatagaccaacaacaagttctgaaattcaggcagcaattaacagcctaccaaccacaaaaagtccaggaccagatggattcacagctgaattctaccagaggtacaaagaggagctggtcccattccttctgaaactattccaaacaatagaaaaagagggaatcctccctaactcattttatgaggactgcattatcctgataagaatatgttccatcctgatcaatgtaccatgcttacttgaaaataacgtctcttctgccacttttgagtgtagtgttctataaatactaggtatatcaaggtggttgacaatgttattctatgccttagctagttttttgtgtagctcctctaccaagtgctgagaatttttaaatctccaaatatggttgtgaaattgcccatttttatccctttaattctgttacatgtgttgatgactgctatatcatcctgttcaacagaaacttttctcattataaagtatcctagtaatctatggtaatacatttaatttgaaatgatataatacggcaatccattcttcttatgcttactgtttccatgatcaatctttttcaatctatttattttcaacctgtatctttatctttttctcctttcctgcctgttttttaaattattttgcactttttcagaattccattttaattttcctgttggcttttcagtcgtctttttttgcaattatttttatatatatccttagctttacatggtccacttatgtaatatatgccagaataatttctaattccatttctcctccaattagcctggtagccatcatactctcactgtctttttagtaattgtaacttaaattataatatttaactttgactttgcaaagtctaaaatgtccatacttttaactcttaccagaaaatacagcaacctcacaaaaaattaactccatttttgtcaggatctcaatttatattacttcagatatttttcacttatataattaaaacacaacataaattatttaaaaatcaatgcttacttttatttattggtttatttaagcattttgtttttcattccattctgtacttatcctcctgagattattcttattgtgtccaaagaatactaggttagttattataggtgtgctagtgacaaatcttatcaaattattggagggtgaagggagtagagacaggatctcactatgttgcccaggctggtcttgagctcctgggctcaagtgatcctcctgcctcagccttccaaggtgctgggattataggcataagacacaatgcccagcctctttcaattttttactgaaaatattttcattttacttttattcatggaaaatagttgtttcttagcactcattttctttcagaactttggggatatcatttcatcatctttggaaatattccattatttgggaacattattcaattatatttcattattattccatcccacatattgacattatcttttggtctacatgctgctgctctgaaagcaaacatttttttctctgtctacattggggattttcccactatctttgttttttaatagtctaatgagattagggattttcttcatatttttcctacttgagatttataggacttttgaaactatggtttggtatctttaactattttttaaaaaatttcaatcattatattttcaaatactttttgctctattctctcctctccttctaaggctccagttatatatatgtaagacatgctcaccgcattgtttttatcttacattctattcttaattatttttattttctatcctcttatctttgcatgtttcactataaacgttctgttctgacgtatttttgagttcgctaattttctctaatgtgaggtctagtttgctattaaagccatctgctagaactcataattccaaatgttttgttttcaattttagaatttctatggggctctttctttttaattttaccttgattacaaatgaaagctattatccatttgtttcttttttatactttccctctgtagaatcaaacaattttaacatacttgaacatactaattaatgtatagttcttttatctagagttcctatgaatatgattctattgtctgtttttttttcctctattattttggccacatagtgttgaatttttgtgtactcattttttaacaagtcctggacacaacacatgaaaactgaggtaatgtgaggtctaggaagatataatcttctgttagagtgagtttacatttgcttttagcaagctcctagaaaactagcaaagttgaatcaccttcactcaatttcaggactgaaataatttatagttatatgtcaatcctctcaaagcaaatctatttccagtttactctttcttacagggtacagtcctttaagctaccaataccaaaatgtagtggtttaccatgtctcctctttggcagatcctagattccaaaatatcactcccagctctgggagctactcaaaatctctccatctccaataccacttcaagaactagcaggtaacccaaaaggaaaagtaggttcactgtctgggtttctttcttcaatacagttttggcccaataaatcttagccttatcagctctctggtgtctttttaaaaaacaaaaacaaacaaaagtcttttccagcttcactagtggtagttagctggactactgacccaaattacataattcaccataattcatgatacttaaactataaccctacaccatttggtgagggtgtggcgggggggtgtgggggggtaattcctgcaaaaaagtatcaggccaaagtacctgactaattgaaagagggcatccaatctttttattcctaaataatgtttaaaaatgtaattaatttgaaaaacagaatggagacccctatgaaacaagtacattaatcttttaaaagtacatatactacttcatacaaaaatcaattttcaccaactgattagttacttactaataaatatttaattaaatgtctaatacatgtgtgctactaaagtttaaaaaaggaatggcttaggaagaacttacagtctgatgggggagccttggtattgtggggaagtataataaaatgttatgggtaaaatgatacaagtatacgctaagtacagtggtgttctaacaataataaaagtttgtgatggggacccaaaaagaaaggtaattcttgaatgtagatgtgaaaaatgaattggtacttaccaggatgagcaagagacaagcaaaggatacgaggtgttcctagcagtagggacaaaagggcaagaaggaaagagctacaggtaatgtaagagcacagtatagcattagtacttgggaaacaacaaggagttcaatgtatctggaacatgttgggggcgaggcatacgtgtgcgcatgcacatgtgtctctgtatgtgagtgtgagtgtcgtggccatggttgtgacagtgaaagtagttagctgttaagaaagaaaaatgacctttgtctatattgtggatggtcatgtgcagcataataaagtacatatacaaatcatatttaacagtaaattagtggtgtatccaataaattaagaaaaaaggtatatgtgctatgatcaaaattattaaacattgctttaaaacacacagaaataatacataaaactatcagaaatgaagagataaaattgttattgtctgcagatactaggtctacaaagaataaatgttttgggttacttaaccccaaaggtgatggtattaggaagtgggccttcatgaggtcatgatagaactcatagattaaattagtgcatttatagaaaagtcctcagagagttcctttggcacttttactaggtgacaatacaggggaaagacaccttctatgaaccgtgaagagggccctctctagacactgaatttgccagcaccttgaacttaaacacctggcctccagaactgtaagaaataaatttctattgtttataagctactcagtttatgatagtttgttgtagcagcccaaagggactaaggcaaatcccatttacaaaagcataaaaaagaataaagtactttaggaataaacttaaccaagaaggtgaaagatttgtacactgaaaactacaaaacattgctgaaagaaatgaaaggagacacaaataaatggaaagacatcccatgttcatgcactgaaaggtttaatattgttaagatgtcaacaccacaaagtaagctacagattcaatgcaatccttttcaaaatcctacagcatttttgcggaaacagaaaaaaaaaatcctaaaattcgtatggaaaccataaagaatcccaaacagctgaaacaatcttgagaaagcaaaaagctgagggcttcatacctcctgacttcaaaatgcattctaaagcttcagtaattaaaacagattggtactggcataaagacatatagactaatggaacagaacagagagcccaggtaataaaaccatatatatatacagtcaaatgatctttgacaagggcgtcacaactaacacaatgtggaaatataatgctgctgagaaaactgggtatcaacatgcaaaagaacaaaagtggagccttattttacaccacacacaaaaccaactcaaaatggatcaaagaataaatataagacatgaaactacaaactcctaggaaaaaaccacaggagaaaagcttcataatttggtctttagaaatgatttcttgatgctgacaaaagcagtaatagatgagtagaagtatatcaaaataaaaagcttctgcacagcaaacaacagaacaaaacagaaaactacagaatgagagaatatatttccaaaccatatgtctgataagggcttaatattcaaaatgtatagggaactcctataactcagtagcgaaaacaaaaaacagaaacacaagtaaaaacttggcaaaagacttgaatagacatttcttcaaagtagacatacaaatgatacacaggtatttgaaaaatgcttagcattacaaattatcagggaagtacaaatcaaaaccacgatgaaatatcaccttacacctgctagtatggctgttgtttttaaaaaaacaacaacataaaaaataaataagtaagtgtcagcaaggatgtggagaaattaaaaccttgtacactattgttgggaatgtaaaataacgtagctgctacagaaaacagtatgaagattcttcaaaaacttaaaagtagaactaccaaatgaaccagcaatcacatttctggatatttattcaaacaaagtgaaatgaggaacttaaacaaatatctgccctctcatgctcattgttgcactattcgcaatagccaagaggtggaaacaatctaaatatccatcagcagatgaatgaataaagaaaatgtattggccggcagtgtggctcatgcctgtaattccagccgagggaggagtattgcttgaggccaggagttccagacaagccctggcaacacagagaaaccttgtctctacaaaaaaaaaaaaaaaaaaaaattaacttagttgcgtgtgtggctgtagtcccagctactggggaggctaagctgggaggatcccttgggcctgagttccaggctgcagtaagccatgatcacaccactgcactacagcctggctgacagagcaagaccttgtctcaaaaaaaaaagaaagaaggcaattgtgttatatacatacaatggaatattattcagccttaaaaaagaagaaaatcctctaatatgctgtaacatggattaactttgaagacattatactaagggaagtaagacagtaacaggacaaacactgtatgattccacttatgtgatgtgtctaaagtagtcgaattcacagaagcagaaagtagaacggtggtttccaggggctgggggtatgggaatggagagctactgttcaatgggaacagaggttcagtcatgccagatgaaaacgttctagagatctgctgtacaataatatgcacatagttaacaatactctattatacccttaaaaatgaaagaggatttcacattatgtaatttttaccataattttttaaaagaatgcactaatgtagctaagaacatttttgttaaaaaaaataagggatatgttgctatattaacagttaaaaattttatagtttctctaattaaggccatgtggtgttaatgctagagtacagaaaggtcaaaggggaaaaaaagactaaatcctaaaagcgcaaatatgtatatgtgttatccacaatcagtgagaaaaaaatggattatctaataaatggagatgagatgatgggctcgccattgagaaaaaaatagagtccacccttatatcatgtactgaaataaatataagacaggtgagagatatacagatttagtttatgacaggtaaaaattttagactgggcagaatattaaaaatagagagtttttctaactcacactaaccctctctaagtcttcaatgatattacactaaagtcatatagattcagtttgccactattttattgaggatttttgtatcaatgttcatcaaggatattggtctaaaattctcttttttggttgtgtctctgccaggctttggtatcaggatgatgctggcctcataaaatgagttagggaggattccctctttttctattgattggaatagtttcagaaggaatggtaccagttcctccttgtacctctggtagaattcggctgtgaatccatctggtcctggactctttttcgttggtaagctattgattattgccacaatttcagctcctgttattggtctattcagagattcaacttcttcctggtttagtcttgggagagtgtatgtgtcgaggaatttatccatttcttctagattttctagtttatttgcgtagaggtgtttgtagtattctctgagggtagtttgtatttctgtgggatctgtggtgatatcgaatccagcagcacatcaaaaagcttatccaccatgatcaagtgggcttcatccctgggatgcaaggctggttcaatatacgcaaatcaataaacgtaatccagcatataaacagaaccaaagaaaaaaaccacatgattatctcaatagatgcagaaaaggcctttgacaaaattcaacaacccttcatgctaacaactctcaataaattaggtattgatgggatgtatctcaaaataataagagctatctataacaaacccacagccaatatcatactgaatgggcaaaaactggaagcattctctttgaaaactggcacaagacagggatgccctctctcaccactcctgttcaacatagtgttggaagttgtggccagggcaattaggcagaagaaggaaataaagggtattcaatcaggaaaagaggaagtcaaattgtccctgtttgcagatgacatgattgtatatctagaaaaccccactgtctcagcccaaaatctccttaagctgataagcaacttcagcaaagtctcaggatacaaaatcaatgtacagaaatcacaagcattcttatacaccaacaacagacagagagccaaatcatgagtgaactcccattcacaactgcttcaaagagaataaaatacctaggaatccaacttacaagggatgtgaaggacctcttcaaggagaactacaaaacactgctcaaagaaataaaagaggatacaaacaaatggaagaacattccatgctcatgggtaggaagaatcaatatcgtgaaaacggccatactgcccaaggtaatttacagattcaatgccatccccatcaagctaccaatgactttcttcacagaattggaaaaaactactttaaagtacatatggaaccaaaaaagagcctgcattgccaagtcaatcctaagccaaaagaacaaagctggaggcatcatgctacctgacttcaaactacactacaaggctacagtaaccaaaacagcatggtactggtaccaaaacagagatatagatcaatggaacagaacagggccctcagaaatgacgcatatctacaactatctgatctttgacaaacctgagaaaaacaagcaatggggaaaggattccctatttaataaatggtgctgggaaaactggctagccatatgtagaaagctgaaactggatcccttccttacaccttatacaaaaatcaattcaagatggattaaagacttaaacgttagacctaaaaccataaaaaccctagaagaaaacctaggcattaccattcaggacataggcaagggcaaggacttcatgtctaaaacacaaaaagcaatggcaacaaaagccaaaattgacaaatgggatctaattaaactaaagagcttctgcacagcaaaagaaactaccatcagagtgaacaggcaacctacaaaatgggagaaaattttcacaacctactcatctgacaaagagctaatatccagaatctacaatgaactcaaacaaatttacaagaaaaaaacaaacaaccccatcaaaaagtgggcgaaggacatgaacagacacttctcaaaagaagacatttatgcagccaaaaaacacatgaaaaaatgctcaccatcactggccatcagagaaatgcaaatcaaaaccacaatgagataccatctcacaccagttagaatggcaatcattaaaaagtcaggaaacaacaggtgctggagaggatgtggagaaataggaacacttttacactgttggtgggactgtaaactagttcaaccattgtggaagtcagtgtggccattcctcagggacctagaactagaaataccatttgacccagccatcccataactgggtatatacccaaaggactataaatcatgctgctataaagacacatgcacatgtatgtttattgtggcactattcacaatagcaaagacttggaaccaacccaaatgtccaacaatgatagactggatgaagaaaatgtggcataaatacaccatggaatactatgcagccataaaaaatgatgagttcatgtcctttgtagggacatggatgaaattggaaatcatcattctcagtaaactatcgcaaggacaaaaaaccaaacaccacatattctcactcataggtgggaactgaacaatgagaacacatggacacaggaaggggaacatcacactctggggactgttgtggggtggggggaggggggagggatagcattgggagatatatctaatgctagatgacgagttagtgggtgcagcgcaccagcatggcacatgtatacatatgtaactaacctgcacattgtgcacatgtaccctgaaacttaaagtataataataataaataaaataaaataaaaatttagaaaaaaaaatcaagtcatatagaatgtccaaacaccagattctagaggtatatagaaatgcacataccaatggcaaatatgagtatgctgtttttcatttgtattaatactgttttttcttatagttataaatgcaaatgaaaactgattgttcagaagagtagtatattattacaggaacagcagaggattttagagtcttaagatctgacagaaatccagctttgtaaacacaaatggcaaaatgaattgtgcttcaacagatgttaaaaatccactaagaataacattttcaaagaatatatattgacatgggaaaagtaccattcatccagccagtcaataaatactgtgttgggccatggactatgtgcaaaagatgttttaaatgagcaaggaagccatcatctttgctgtcaagaatcttcaagtttagtgagaatggcaaacaaggattacagttataatatgattgatagaaaaggtacaaagaaaaatatctaagtacctagcaggggaacctgcctagtctattagagtcagaggttttgtaggaaaaataacattttaagctcagatctgaaaagatacataggaattagcccaacttagtgattatggattatgggtggacatatcaacaaattgaaagctcagtattaattatcaagggagaaaaggcccaggatcaatggtggggaggggagggtgtgcggggagggaggcagtgcagggaggggagggtgtgcaggcagggtaagagttcggggacccatacccagaactgtatctatatgaaaggcctaattacgtctgcacatagtaagattggaagtgcacaaaagaaaatattatcagtgcttaactcttttctatatttcttaatcaatcatacattaccatttactctactgatcaaaagtgttattaaaataatactttaccattttgcttttattaaaattttagacaagactgttaaaactttgtgtattcatttggaaaataaggctaataagatttaacttcacaaagttgctgattaggatcaaatataataacatgtgcaggatggtggttttgtgactgtggtcactggacctaactcagtatcagagtgagcagatatagaattgggaagtggttgtaaaaactgatagatcaggaggataaaaatgtggacctgatgaagttgatgagttggttactacagtgttgtcactacccactttagtaataatgacagtcaatgctaattaatcctctctcccgctccttagacccaatctcagaatccttagcaacttagtgctccagacagccacttacaactaatttagaatggcatgttacttgaaatcttttactatcactagccttggaatttcaagtatgaatacaatcaattatacaattttttaaaaaaggtagtttggctataaaaatgtctttttttttttttttttttttttttttttgagacagagtctcgctctgtcgcccaggctggagtgcagtggcgcaatctcggctcactgcaagctccacctcctgggttcatgccattctcctgcctcagcctcctgagtagctgggactacaggcgcccgccaccacgcctggctgattttttgtgtgtgtgtttttttagtagcgacagggtttcaccttgtcagccaggatagtctcgatctcctgaccttgtgatccacctgcctcagcctcccagagtgctgggattacaggcgtgagccaccgcgccaggccaaaaatgtctttttaaatttatattttaacctttaaatgttctgtttctctgaaagtatatcttctagcatgcccagaggttctgatatattaaatattattttgtaagccactgttattcatgtattatgccagaagcaagaatttagagactatagcatttaaaaaaatatatttatatatatttacaaataataaagtcagatacaaatacatctttagattgagtgttgctttttcacaaaatgaaaacaagtgaatttcttacctttcctctggagtatctacatgaaatgttctctctataacagtagtccactggagacatctgattataaatgtgtttggctttggtcgttctgttttcattaactggcattctaagaataaaataaaatgtttctttaaatatggatatatttaaaacaagaagtaaataattgagaactacagagttctattttaaacaaaacccagtgcgaactcacagctttctatggttctccactcaagattatttacagcctgaccttagtcttcctttccaatccttcacccattctggccacattaaccacctcaactggactatataattttccccaaacacacatcttaactctttcatttatttatgcctttgctccagctgttcttgctatctgaaatactttcctcacttattttacctctatccatatgcatcacctgcagtcacaatagtactgatccttgaaggtccagatcaaatattattccttccatgaaaccttccataacacctcgccctagactgaccatttcatcctctctattctctttacttattaccatatccctcatgtgtcacttaccatagactatcttacagtattacttatcattttaagaaaatgacaaatatcacttatccttacctagattataagctttttgacaatataaactgcctgtaactcttagtatccactgccccaagagccagtcactctaaacatgattaaattctgttactgaataactaggaagatgtcaacaaacatgagcctaaagtatggattctctgacactggtgtgcgtagattcaattattttttcgtaccattaactacacaaacttggacaaattaattaaactcgctagtcttcaacagttaagtgggaaacagtatctacatcatagaattgatgtaggaattaataataagttcatctaatattagcataatatgagacctataagctttcaacaaacattaactattatttggcatacatctgagctgggctttaaaggataaatggtattggacaccaagaaaaaatagggtagggttgtctgctgactctgctcttttggaagaaactaatttatctccgttgaaaacttcaagtcttttctcagtgcttatctgctgtgtcctatctccatcattagcaactatcaactgccatttctatctctttatagttccaattctttactcagattagctgtgtttttgtttgtttgtttgtttgagacagtctcgctctgtcacccaggctggagtgcagtggcgcgatctcggctcaccgtaacctctgcctgctgggttcaagtgattgtcatgcctcagccacccaagttgctgtgattacaggcgtgcaccaccatgcccagcttatttttctaattttagtagagatggggtttcaccatgttggccaagctgatctcgaactcctgacctcaagtgatccgcccgcctcggcctcccaaagtgctgggattacgggcttgatccaccgtatccagccccagattagctctttattggccctttacactgagagaaatcattcacccaagggtctctgcttagttttctaacagtttacatgttttcagcaatcatctctcagtttaccaatatcaaaatccaaacttttttcaccttgcagttctactttaagacacacgtgtctaaacacatagtgaatatttctacctggttgaattactggaccacccctaaaaccaaactcagtattttccccctaaaattcattcctcctcctggctttcataattttccatcacccaggctgaaacataaactgatcttcctttttgatactggtactatttgtcattacaggtgctcctcgacttatgactgtgttacattccaatacaaccatcgtaagtcagaaatattataaggcaaaaatgcatttaatacacctagactacccaacatcatagattagcctaacctacttgaaacatgctcagaacacttccattagcctagagttggacaaaaatcatccaacacaaagcctgttttgtagtaaagtattgaatattacacatagatgggtgttttgtcgacatgatgagatgagaaaacacaaaaactaagagcatccagaaaaatgctggcaacacagtacactgtagagtatctactgtgcatgttgtgatcacgtggctgactgcaagctgtgatttgctgctgctgcccagcatcactagggagtatcacacagcaaatcactaccccaggaaaagacaaaaatccaaaatttgaaatacaatctccattgagtgtgtactgctgtcaggagcacggtaaagtaagacatcgttaccatgaactactgtaagtgggagaccattcgtaactggttttccactgctataattctacttcagattctgtgtgcccaatgcctaaacctcccggctgccctaagacaagattcttcctatttagagatgctgagtgactatgtaagttaaagacagaaactgtgctctgggagacatctgaacatgtccgaacgtgaactcttgacctctctcaaccctgctccttcttctgccaacctctactgtggcttcctctatctcacatgacacctccatcctttcaattgcccaagctgaaaacccaagaattcccttggagtcctctcttccctgacatcacattcactcctcctgcaaatcttggtgtttctactttaaaaacataaccagcttctgataacttctcaccacctccactacctcagactaagccatcattgtctctcacctgatgattccaaaaaacttagaatagcttttccctgcccctcactgcagtctgttctcaacacagcagccagaaatcttcttaaaatgaagatctgcaaaaaagttctgcagtgtttcagttcactaagaatagatgagtaaggcctttaagtgatcagcaggtgtcctacgtgatctgaccctcccactgaccccactgaagtttctgacctacttccttagtactctctttcaggctgctctgccagccaccctggcttccctgcatttcctcaacaatgcactacactctttctgctttagagctttttgccctctgcctaacattctttcccccctcacacacccgcacagctgctctcttagacatcctatttaatactgcaatctgcaccccttacctaggactctccctccatcttctcttacctgctctattttttattttccatagcatgttaccattttctaacatttgatatgaagttttttagtatcttttttgcttattgtcttttcaactagattgtaagctccattcatatattcttagcacttagaactatgccagacacatagtaggtactcaataaacattttccaaatgaattctgatagtaataatccaacaaagaaggtaattttgatgctaccaaaagataatttctaaagcaatgtacctatataagcaagaagggattaaatttactggacaagtaaaggggtagctctaatcaggagtataaatagtttagtaataaaataaaagagaagatataagggcccaaatgcaattaggagtacagaagcaagtaaaagctggtagaaattattttctcactgcttctgtttttttcagtgaattaggatataaagtcatcgggaataacgttgcaaaaggatccatcaggctttgaagaaaaaaagatatgaaatagcactctgggaaaatcaaagtacaaataggctaaggagaccaaccatgactgccgagaaggatgaaggaccaacctgaatttaataatgaagaatttaaactaataacagagatcatggttgtgtattttctcccagatatacccagatatattcagctgcatgtgtacaggtgaggaacatagagtaatgaatttaagcaaggctgtactttaaccaagtaagtttgtcaaagcaagaagacagaaaagaataaagaatgcaaggcaagggagtgattatgatactcaactaagaaacttaaaatgggtatggaggaaagtgagaacctggggatgtgcaagacaatgaaaaggtggtagaatcaataggtcataaaatctattatatcacaattcaactttgtatagcagcatgacattttttgaaatatgaaagttaaaaaacacaaaatatatattccacaaaaaataagcaaaaatattgttcatttgaaagacttaagttttaaaataccaaagacattatactaatttatactaataaagagccaaccaattcctatgactgactctgcccatcagtctgattctctttgaagccaactgttcctccccatatccttcttttcaaaagccctattaaatttccagccagtaattcactagctatattacttaaaagttaggaattgtgtgcacagttcttcttatagcacctaggacagtgacaggacataggagtatacaataaataccctgattgggcaactgattggctggctttaaacgtaaagaatggaggacagacacttaaatgaggggcgtgcccaagagaaatactatggggtacagagaaatacagcacagaagcaaagaaagaatgcccggtctgaggttcactatttcagttttacttcaggttcccattatggtgatataaggtaattaagataatggactctgcaatcagaaagaaattcaaatccaggctctaacacaatcagctgtgtgatccttttgaaagtactttatatctaagccctcaggtttatcatctttaaaagcactatcatgaattaaaagcatattttcaacactatacctaaatgaagtttaaatgctataatttaaagaacttctcaacactagacttttagaagctactcgaagtgctgttataagattccaaatatcaattactataatttataaggctgctaaaaacaataaaagatattactataattaccattctcaagcagatcactgaaaaggaatggcttagaaaagaataaaatacctgtatttatgtatagagtggtttggaaaaatattaaaatagtaacataatgactaagtagttatgcacaacttcactgttcttactaaacttgctaagtattcatgaaccaaatgacatatatgaaatgtcagttatgggccaagcactatgcaaaatgctgggcacacaaaaatgagtaggaaactctatgagctcatggtacacaccatactactgatcattctacccatgtaattataaagtagtatttcatttatgctataaagggtttaatcaggtcctgtgaaccctctagtccaacaaaaataatgttacgtgtaattacaaataaacagtataatagaaataaacctatattttttaggtctcagtatgaaatactctacaaacacatttcatctctacaccaagatgttcaagtggtagttggatcactaccaagagaatatcacaatgtcttatggtttgttgctgtacaaaacaaatgtaatttaaaaagctgaatccaaattcaaaaaagttaaaactctaaattaccatgttaaaaccagtgatcgagtaaatagaaaaacttttgagttcttgcatgttcgcaataaggaatcagaaacacatgattcttaaaggaaatggtggttaataaatggattagccaatacttctttagaagaatatttgccttttggttacgtaaagattcccaacgcaaggtagggcaatttaaattttaaaaatcagaagtagaaactttggatagagattctaaaaagctattaaccaaatgattatctacgatttttagaatcatttaatatgcatcagtaaagtaaatgtgcttatacaaaatgccaggtagctaactcttattataacatctacttctcagtgttatttgttacactgttacttatattagatagttatacactagttaaactctactgagcaacatgaaccacaagctgaattttaaatgttctgcttactttacaccattctgagccacagatgacaaagtctgtacaaagctgtaattactctgcaaacctgaaacccaattagagagactgcaacatgtcagaccaagaaatacatacaccaaaaaaaaaatttttagagatcatctgtttagattaaaatgtttaaaggtttaatttcaaccaacctctttagccatttaaacactaattttattctttctaaaataacatccaatgtgaaaaacgaaggcataataatagattccttttttttttttttttttgagacggagtctcgctctgttgcccaggctggagtgcagtggcgcaatctcggctcatgcaagctccacctcccgggttcatgccattctcctgcctcagcctcctgagtagctgggactacaggtggccaccaccacatccagctaatttttttgtatttttagtagagacggggtttcactgtgttagccaggatggtctctcgatttcctgacctcatgatccgcccacctcggcctcccaaagcgctgggattacaggcgtgagccactgcatccggccagattccattttttattaaatcacataatgaaataatgctggctgtgagttatgatgaccataaaccaaatttatttttcaggtcttaaaaatatgatacaccatggaggttctctgaaggggacaaaaagcatttctatcttttgtttaatgttttcactaggggcaaaaaagcataacacctatttaagactcaatacatcaacctttaagagattcatttaatccaatgagcggaaggtgacttaggtgaggcaggtgtcctggtagagagcattccagcagcagataactgttgagtgatcactacgttccaagcactgcacaaagagtggtgcataaatgttattcatttaatccaaaggaaaaacctaaaaggtgttattatcttccattttctaaatgagcaaatttacaagactcaggcaagctaaataacttgccccaaaacacacaactgtgagtcattatataaggatttattccaagtctatctcaatcccaatcccatgctcttctgaagagaatacactgctaggaaaaatgccttaaaaatcagtaatcatctgtcaaagccataggaatgtctgttccctcttctataccttctctacaccttccccgtgcttggcccttctcccatctatgacactttttctcatataagcaaatccaggataagtttcaactgataacagtgtttgagcgggagagggctccaatgtgtttgcctctggttctctccacagtatagggatggacaggaatgagggttatcccctagcaggatgctgatccttgacatctcgtttctccaggtaggagtaacgggaggcggtttagaatgagaagctgaagggaaagaaagtggtaaggatagcagaaaggaaggcaagagagcctttgggttctttcactgctggctctcacattctccaataccaatgaagttaatgattaaaaaaagttcaattactaataatggaaaagtgatctgcagactcacatcaatccagctccgcattgctagttatttttgtctgaaccatttgcgttttatcacccaaactcaacatatctctctccacataagcaaataggagagaagacaaagttcttacatttgattccataatacaaggggttcaataaataatgggagtcagactggattactaacattacatttccctctagaagatgtttttcacttcatcatccacattccaaattgtgacattttaattatcataaaccaccactttggaattaacatgaaatactatttatgaacttgagttgaatttgaagtcacgatatgttaatgtgaacttctcctaacacatttttcttctttgaatatggtcactacagatactaccatttaccaaaagcacacttacagagccaatattttccccatcaacatttctctgtcttgtttgcccaccgaatcctgcctctaattaaacaaacatacacctcaagagtcttctggaacaactgttcttggcatactttctgcctacttgaaattccaaataaacgtactgtggtcattttgagacaatagttaaaatataaaaatgacataaggcatttactaaaagaattataagaggcatgcaaacatctagtggactcaaggaattaggcatgttggttttttggctttgattttggtttttgcagtataatagccatgggctttttaaaaatgtagtaaaatatacataacatgaaatgtaccattttaaccattttaagtatacagtttggtgacattactgaattcaaattgttgtgtgggcaagatggttttcaaacatatttcttgatttactttcactgtataaatcatccatgcttaatacagaaaaatacatacataagtataggcaaaataaaaatactcataatcctaccattcagttataaccattattagtgtttgaatacatacatttttagacctattctaagcactttttagaaacaaaaatgagaccattattgatgatattatatgttttggatattttccatttcagtaaataaagatctacatcattatatttaatagtggcataaaactccattgtactcatacaccagaataagcagtttatttatagtcataatgcatgaaacagaagtaaattactcagatgtacacaggatatttaaccattcattacataacatggtaaaatctgaaaaataattatgagattttttttttttttttttttttagacagagtcttgctctttcaccaggctggagtgcagtggcgcgatctcggctcactgcaacctccgcctcccgggtttcaagcaattctcctgcctcagcctccggagtagcgaggactacaggcgtgcgccactaggcccagctaagttttgtatttttagtagggatggggtttcatcatgttggtcaggatggtctcggtctcttgacctcgtgatccacccacctcagcctaccaaagtgctgggattacaggcgtgagccactgtgcccggtctatttttaagaaaagctatttatatttgaaacatgatgaaactgggatttgataacaaaatttttaaacaattcaacaagaatgtacattagattgaaaattcccttaggggaaggtccatactatttgatttctggtactatgcctaaacagggctggtctcaaataaataaacagaatgactaacatactgccccaatttatctgtgccttggctaattgaaatcatgttaaaaaatacctaaaagataatctacccctaataaaataattaattcaggcaaaaatcaccaatggtaaaatcatttggtaaataactaattaagactaaatattgcatagtgccaacatgtcaaaccacagattatctggtaaccacatgagagaaacttagtttataatgaagagatgacactgtcaccaccgtaacccagtgaacaatgatagcattactaagagctggtcaaccaaatactaggtacctcttgacataacgcaatatgaagtacacagactcacgaaggaaacaatcttgataaaaattctgaatatgaatctgatggaatccttagatctaacttccttttacagtaaatacagaggtagaggaaaagttaaatgacacctcgtagaaacgatcagagaattccataagacagaactttcacaggacaaatgaagtagtctctttaataagtgaatgtacccaaaagaggggtgaggaaggtagtctaatactctgctggactagtagggacttaaaagatttataaaaaccaaatgcaatgcgtggtcctccttaatgcattctggtctaaacaaaccagttttaggcaacaagtgggaaatctgaatatgaatttgtacttggtaatactaaagattagttttattagatgtgattgtgatacagcttttaaaaaaattttcaattcatgaagtagatgtgcaggtttgttacatgggtgtattgtataaagctgagatatgggcttctagtgaactcatcacccaaataatgaacatagtactcaataggtagttttctggtccttgtcccacccttctcctttttggagtccgcagtgtctattatttccatctttatgtccatatgtaccaattgcataggtcccacttagaagtaacttacaacttaaatgcctcgagatttccatctgtaccaatgagacaatttctactcacgtatcttcaaagtagcttatcagtgcatacataccacagtgaaataaacaataaacatatacaaagaccaagatgcagattcaaagtcactttttttttgagatggagccttgctttgtcatccatgatggagtgcagtggcacaatctcggctcactgcaacctctgcctcctgggctcacgccattctcctgcctcagcctcctgagtaactgggattacaggcgcatactaccacgcccagctaattttttgtatttttagtagagacggggtttcaccatgttagccaggctggtctcaaactcctgacctcaggtgatcagcccgcctccacttcccaaagtgctaggattacaggcgtgagccactacatccagcctcaaagtcactctttaaagcacttgtattaaatgctgctcctcttcccgctaactgccccattcctctccttcgttttgctggtaaatcactcaaaataatctacaaggctggcctttgttacccatgccttaaccaattagctaaattctggtttccaccactctactgcagtctcctttttatcagatatattttccttgttctcattttcatttctttgcagcatttgatgttcttggctccctatcctttgagtcccttttccttgacctccatgacactgacttgcctggttttactaccatcccataccattcattagtttttcttagggcctctacttccaaagtagaggctcagacctttaccttccaaaggctcagacctttctgttatgcttttatttttgacattttttcccatagtaaatctagacattaattacacaatatttgttaggtacccacagtatatcagccagtaacctaggcactgaatagcagtgaacaaaacaaggtgcctattttccataaagcttatattttactgaggggatgagtagtcaaacaataaacaagcaaaacaattaatttataacatagtaggtgcttataaacaatatgaagaaaaataaggcaggtcaacgagttgaagtgaacgggaggtgatactattttcgaaagattaatttaaaagggtgtctctaatgaaatgagaggccaatgcagattaccttcgggaagagtaagttacacagaatgaacattaagtgcagactcacagctggagggattccacagatggatttgtgaaacagcaagaagcccagtgtaattggagtcaagtaagttaggaaaaaaggtaggagatgaggttagaaagatcttcaatgagttggtaaggactttggatttaattatagataggctccccagtagctctgcatcgactgacacctgatgtctgatgactctcaaacctgcttcttcagtcacggcccttctcatcaagctccatccccatatggcaaaactagcatctcctttgatgccctatactgcctcatcctcaagatatccaaaagggttttgtttttgtttgtttcagcttccaagttgaaaattactataccagtacagtttttctattttatttccatatcatcttcctaatcacccaagaaacacttcctcagtcatctctggctcgtccttctctttcagccctcatggctaagccaccaacattcatgttaacagtttgttcgttatgactcttggaatcatcctttttttgtccactgctgacacccaacccgggaacttactatcaaaatcctcatcactgaaatgacctcttaggtggtctcccttttctacccttctccctaagttgtcctacatactactagtaagatgagtcctacccaaattcttaaactgtatgtcattctcttcaaaaatattttcctgtctgcaggacaatgttcaaatacatttcttagcctgactttcaaagctattcataaggaagccccattaattaaaacaaaaagtttcaaactgtattcctcactgccaaactataagtactttctgctaataaacatgtctcttcactgtcccctaaaaattatctgattattattaacttcaggatttaacaactcatgctgtttctctcacctgacacatactcccttcctttttacttagattctagtcactcaagatcttctcttattccaactcatactctctatccctgaagatctactacacttatttgtatcccatatggtggtacttcatcatatgctgtgatttatttgactgttttgagtggaactccttaagtttcagggaatttggaatacttctcatagttcttttctattcatcaaaatctaagcacatacagactgaattctaggaaaagcttcaggaaacatttcagaaacaatataatttctcacaacttatttttttctcataaaatgtatatttatatatttcatatatatgaaaaaatatatttttcaaaaaacatacttttcaaaaaatagatatttttgaatcctaatcatatttttgattttggagcaacagctctaatacttgagatatttttttttccacaggaaaaggtgaaaggagtagatgtaaagaataaaggatttttcccccttggagaaaaataaaaaggtaggtctacttatccagagtaaagcactgtccaaataaacaatgaattgtggaggattataaacaaatcaagtaattccattaaaatcaactatagagggtaggtgcggtggctcatgcctgtaatcccagcactttgggagactgaggcgggtggattacctgaggtcaggagttcgagaccagcctggacaacatggagaaaccccatctctactaaaaatacaaaaaattagctgggcgtggtggcgggtgcctgtaatcccatctgcttgggaggctgaggcaggagaattgcttgaatctgggaggcggaggttgcagtgagccgagatcgcgccattccactccagcctgggcaacagagcaagactcttgtctcaaacaaacaaaaaaagtcaaatatagagatagcctatcagtcattatcagaataccacctctttggaaagcactctctaacttctttaaactttaaggggaaggtatagatgtgttttctttgccttcaggaattctaactccaaataagttagcctggctttgaaagatggttccaaccacagacataaaaaggcctcttgggtatttactacagcaacaacaacaacaacaaaaacaataaaaacacttcattttaaaatctggtttgatagatagcaagctatatgaagtaaagtaaaagaatcagctccttcactgatctctagaagaatggggggaaaatctcatcttaaatctctgccaatttaaatcagtaggaaaattttgctttctattatatctttctccaaaatttattttttaaatagtaactactaagtaattatcttagcatattatcagttgattcactacattaagatttcacatacattattcctcacttaatcctctcagctgagttctaaagtatggtcatttccagttcacaaattttttaaaaaggaagctatttaatgtctaaatcacttattcaaaatcatcaagccattaatgtggtaaaactgagtctcaaatccaggttttctagctctaaattcatgtctctttttgtatcacatactgtttttaggatggatgttggttgtttatgaaaggaagtaaagttttctttctttctaataacgtttatacacagtcaactcttggaaaatacaggtctgaacggcacaattccacttatacatggatttttttcaataatagtacaccaaatgtgcctatctctcctgccttctccttccacccgctccacatctcttcatctctgccacccgagacagaaagactaacgccttctctttctcctcctcctcagcctactcaacaagaagacaatgaggatgaagacctttatgatccacttccacttaatgaatagcaaatatattttctcttccttatgattttcttaataacattttctcttgcttacattataagaatacagtatatagtgcatgtaatacacaaaatatgtatcaattaactgtttattggtaaagcttctgggcaacagtaggatattggtagctaagtttgggggagtcaaaagttagaacaaggatgtttgactacacaagggttgaagcccctaaactttgcattgctcaagggtcaactgtatttcactttctagttttatgtgaataaattgatacaaacaggtgatagagaactgaaatatgttttctcccagagaaaactgaccaatcttttatttagtattcatgcattaaaaataactgccatcttcattgacattatatgtaaaagcaccaacaagctctgatcacataagacaaagttctgtaagtgacagataagttgtcaagtaatattacactgcttcaggacttctttatagaagttatatttaaataatgtctttctgtcagtatcagattattggaacaaggctgagaacacatttaaagtgttcattggccaaaatgttaaaaacctaacatgaattaacatgtaactaaagttgcctggagtctaatatcagaatttattcaggcttgtcagtctaagccaactttgctgattccttagtcataataaaataatctgtctataaaaataaagacccatcaataggtaaagaagagagatggaacttcctagaggcatagaaatatcaaacaatttatgaggcaaacagtaaatctgtaaataatactgtttaacaaaaatattttaacaaaatgttacacaggactaacgtgaagttcaaaggaaacaatgcatatgaaatagtgctgtaaagattattacatgtttatttttaattatcttataagaacaccctatagagacagaaactttatcagtgtgcttttggaagcaataactgttgctggttggatgattcagttatcatgaactattctggcaggtttcaaaagcagtgccattttaaaacattaaaaatgtctaaaaatgcaaccatagtaatagattctgagtgcatgggttggggggtgagggagaaagacaatgacaaattggtccaaaaggacactgagacttcatagttggaagactattgtgctgacaattagtaacagaggaagcagagcacaaaacaaatgaatgaaaaaagctgaacttgcaatgaaagaccttattatagttcagaaacattattgtaataaaggggcaatgtactctcctctataaaacttccaaacaggcaccctagtctcttttctcttcccctgcatttcattttttcattagcatctgcttgattatgtattatttccaacccaaaagaacgcctctgtatctttcctaaattccaaggcttaaaggttcttcctcccaatgtggccttaggcctcatttaactttactcaaagtataataaacgcttttaaattaaaataaagatataggggtgaaaaaatcagaaagccaataatttagcatgtatcaactcagaggaagcaacaaaacatgtccctcaagttcaacttgttaaaaatgcaatgattatataacttactgcaaatattcagatgattctgcctctaaaaaaaatcagtgtctcccctatggcttctatgacttagttggaaaagcaatgctgaaatcttcacatactagtgaatcatctacattaagctgctgtttccctaaatggaattatccaaaagttctcaaatacatcttcatgtattagtcaagaatgacaagatctgatccatgatacagacagacagactagtctagaggcatggaaaacccatatcttctgaattgcccacactggaaaacctctcacctcaaggccctactgtaaggtagtcagagatccattagttaagtaggaatatggaaaaagcactggtctggaaacttgaaagctgcaggtttatctcccagctccatctctgaaagaattccttgccactgggaaattccatgaacctagtttctccagctataaaatagactgtttgtcctccaaagatgttagtaacattaaatatatcttactaacacacacatatatgtgtatgtatgtacatatatatatgtatgtaaaatacgaggcagaaggtactcaacaagtggtaatttattactatactactccacaatatactcaatatttcaagaaataattatctgctgctgataggcaaaccactgaatttagaattagaagaaaggactttagagatccttcactctaactccctcactctacagatgacaaaattctgagtcccagtatggttaagcgactggctcaacattacataataaaactctatcaaatttatcagccacccatctacgacatctatatttgttcctttgctctagcagaaagaagtctcgctattatatataatacaactcctgacaacaatgagagtccactattaacccactgggtgatacgtggcatagcacgaaagttctatgggtgctgacgacgtattacttgaagagagctgtcatctctgaacaccatatatgattaaatgcattcaaaccaggtgttagagttcaaatcacagttctgccacgtacttgctttgaggttctgggcaagtttttcagtctctctaggtctcagattcattatctagttttttttcctttaagtaataatatttatttcatgtttttcatgtgatgacaaaatgcaattacacaaataaaacaccttgtaaaaagcaggctctttaaaaatgttaattttcttcctttacttccttaattgccctcctaatttccgatgtattaattataaaatgagattaaaacaccaaatataatgggcaaacaatcatctttctaattacaatttcaaaaactagttacgcacaatcctctttctagaaactataaatttaagtttaaaatgacacactaaaaaaaaaattcaacaagtaaatcaaatagttatctacattcaacttaaccaaaataatctatacgtttaataaggtcataaaaaaattatacagtaaatacactacagttgccttatcacacgcaggctgcaggtggtgatcctcctaccccaccctccacttcccatccacaatactccaacttccctacatacaagaaggcaaatttttaaaaaataaatatataaagagataatgtaccaccttccaagctacagtttataacctttttagcttaaattttaaaaactctgtaggtaggattttaaaatggagtatttatttgtcagtaaaattattttatattctaccaggagaaaagatgaacagcaatgttactacagaaactacaaataaaacacgaggtaagctaacaaacagggtagctagtgcctaactgtggccctgagaaaacaatgtctgacatgattagggcattctgctaagtatttcaaacgccatatttattcctatcatttattctttttcctcatttgatatttttcactctatacagggataaggacataacataccatctggagctttcattcatttctgaagatttcatacccacttactttgacaagatgaaaagaaattcagccaaagtttctcagaaataatttttcaaattaatgctattcttgttacctggaaagtaactttatcttttgaaatcttactatttctccaaacaatctcaatgtccaaagaagcttttcttgatgattctgtctttaatgatacctctttttcctaaattgtaactgcatgtattaattgcaaaactcccttcaaaacttagccataaaacatctcaaaataccaatcccaagggtctgtggcatatttttgctactagactataaattctttaaagccaagggctagatcttgtatctgtggaataagaaaatgaacacaaaactctaggttcactctgttagacatgggttcatgctgtgggctctgccatttgccaaacagtggcctaagcaagtcatataaccactctgagttcctttaaaatggggagcataatacttacctcacagtgttgttgtgaagataaaatgagaaaacatatgtgaaagggcttgatacatagtaacgctcaaagaaaggttggtttccttatttccttcttttttcccctcagtacctggtacaatgttgagaacataataaccctcaataaaaacttcctaaatattcattacaatttagacttcctaaaaaatatatttaaatattaattttgatgactcctatgtttccaaattgtgttactttaagtcaaacacatacacacaaggtagaaaacttcaaaacacagtaggtgcaaatggttgttatttgagatggctagaaaagaaaatcaaggaaggagtcctaagtatttaaaaataattgagtgatactaattatatgtagggtattcccttacttaagcacctatcaacaagtaatagttgattgctgaccttcgaaaaagttgagtgagacagaaaggggggaaggcagatacagaggaaaggaaagagggaaaaagaaaggaataaaggaaggtggtcatgctggaatctcttctatgtcctcagtataaactattgaagctgataactacttgcctgccttcctttaaaaacaatccccattgcatcctccacctctcaataaagcagtaatctaggaagcaaagtacctttaatttttcctccaatggataggatcctcttcaaccagtcagaaaaatactgaaggattttattactttaagaaaaaacaacttctgactaaaaagggaataacaacagtcacacaggtctttctcagcctgcagcagctttgtcttccaaagcccagggtttgaagaatttggtctataccccgttccccttgccctcacccaaactcttgtctctgatccaatggtgttagatcttatttattttttttttagcaatcaatatatgttaattgaatacttttttttgtataaatgttttttacttttttttattatacttttaagttctggggtacatgtgcagaacgtgcaggtttgttacataggtatacacgtgccatggtggtttgctgcacccatcaacctgtcatctacattaggtatttctcctaatgctatccctcccctagcccccaatctctcaacatgccccggtgtgtgatgttcccctccctgtgtccctgtgttctcactgttcaactcccacttatgaatgagaacatgcggtgtttggttatctgttcctgtgagagtttgctcagaatgatggtttccagattcatccatgtccctgcaaaggacatgaactcatcctttcttatggctgcatagtattccatggtatgtatgtgccacattttcttcatccagtctatcactgatggtcatttgggttggttccaagtctttgctattgtgaatagggctgcaataaacatacgtgtgcatgtgtctttatagcaaaatgatttataatcctttgggtgtatacccagtaatggaattgctgggtcaaatggtatttctagttctagatccttgaggaatcgccacactgtcttccacaacggttgaactaatttacactcccaccaatagtgtaaaagcattcctatttctccacatcctcttcagcatctgttgtttcctgactttttaatgatcaccattctaactggcgtgggatggtatctcattgtgttttgatttgcatttctctaatgaccagtgatgatgagctttttttcatatgttggttggccacataaatgtcttcttttgcatagtgtttgttcatatcctttgcccactttttgatggggtacttttttcctgtagatttgtttaagttccttgtagattctggatattagccctttgacaggtggatagattgcgaaaattttctcccattctgtaggctgcctgttcactctaatgatagtttcttttgctgtgcagaatctctttagtttaattaaatcccgtttgtcaattttggcttttgttgccattgcttttggtgttttagacatgaagtctttgcccatacctatgtcctgaatattattgcctaggttttcttccagggtttttatggttttacagttttagggtttttatggtttttggtctcacatttaagtctttaatccatcttgagttaatttgtgcataaagtgtaaggaaggggtccagtttcagttttctgcatatggctagccagttttcccaacaccatttattaaataagagaatcctttccccattgcttgtttttgtcaggtttgtcaaagatcagatgactgtagatgtgtggtgttatttctgaggcctctgttgtgttccattggtctacatgtctgttttggtaccagtagcacgctgtttttgttactgtagccttgtagtatagtatgaagtcaggtagcgtgatgcctccagctttgttcttttggcttaggattgttttggctatatgggctctttcttggcattccctttgaaaaccagcacaagacaaggatgccctctctcaccactcctattcaacatagtattggaagttctggctagggaaatcaggcaagataaagaaataaaggggattcaaataggaagagaggaagtcaaattatctctgtttgcagatgccatgattgtatatttagaaaaccccttcttctcagccccaatctccttaagctgataagcaacttcagtaaagtctcaggatacaaaatcaatgtgcaaaaatcacaagcattcctatacaacaataacagacaaacagagagccaaatcatgagtgaactcctattcacaattgctacaaagagaacaaaatacctaggaatacaacttacaagggatgtgaaggacctcttcacggaaggctacaaaccactgctcaaggaaataagagaggacacaaacaaatggaaaaacattccatgctcatggatagaaaggatcaatatcgtgaaaatggccatactgcccaaagtaatttataggttcaatgctatccccatcaagctaccattgactttcttcacagaattaggtgttacttctttagccatagtgatgtcttcttttttggccagaaggaggccataagcagggtttgggaatgtacctcactctgtttagtcattaagaaagaatagccctgactaatcaaagtcctaggcatgaaatgaaactagaaattttcctccaaccaaacaatagtatttggcctcaactgcaacagactgttgtaagcaagttctctaaaacctttaagactctttaaagaaagctcagtaaagtggtttcctcctcactccaatgtaatttagctaaaggaggaatgattgccagttaattcagcaaacattactaagtaccttctatcttacgttaatactatttggatagcattttacaacatacaaattgttttcatatatatatatatatatatattttttttttttttttttttttttttttttttttgagacaaagtcttgctctgtcgccaaggcttgagtacagtggcatggtcttggctcactgcaacttccacctcccgggttcaagcaattctcctgcttcagcccagtagctgggactataggtgtgccccaccaagcccagctaatctttgtatttttagtagagatgggggtttcatcatgttggccaggctgctctcaaattcctgacctcaagtgatccacccacctcagcctcccaaagttctgggattacaggcgtgagccacaccactcggctatatgatctcacttgatcctcactgtaagcctgtgaagaaggtatcattagctccattgttcaaagatgagcaaaatgaaaatcagagaagttatgtgatttgcccaagatcacatagctagtaaagcagtagaacctagtcccaaagtcaggtcttctgactacaagtccaatgatgttccagtataccagatattgtaataaatgctgtgggacatttttaaaatgagtatgcatggtcactgtcttctacaagtttaccattccctttgattctaaataagcccccccattccttatattctgataaaagaggctcagaaagtaaagactgtaactaaaatgattggcttgggaatacaaatcaggaaaaggctgggagatcgtggaagctactaaagaagaggaagcaggctctaaaacagaaatctgatcagatcacctgtagtgttataatgaaggaactattaaaatagtgagattatttaataagaaactcagatgatacacatgaaaagttatgattataaaggagataacactgatgaaatctttcagagatgcagagggttgctttcacccctggcagctggatttgaaactcttgactgccgcagtcattttcattaagatgggatacactttttctgttttttttttctttccacatttgttgtacaacgtaaggaaaaagtaggaaagaatgaacgttttgtggaatttttgttcttttcaaattggagtatgatttgaattggagcctgaagaaggaaatatgtgacattgttacattatagttttcttaaaaatgatctcattttaaaataatttttacaaaggttttctccattcccaattctaaacttggtttaaggttaaattctgcaaatatctgaacataacactacctatgaaaatagaagcgagaagcaaaatttgattaaatttacggtaattcacttcttaagataaggcagctattccttacagtgggatacacctgttaacagatataactttccatttgtctaaaaatttgatagcataaagaaaaaaacaagtatctaaggtgatggatttatcaattaccttgatttcattatatgaatgtatcaaataatcacatgtacccgaaaatatgtacatctaatatgtatcaattaaaaatgttttttaaataaagtaaatcaagaaaaaaaagaaagcaccaaatcttcaagtgataaaatgattaaatgatctaaaaatcattaaaaacaaacacagggttaggaattttgtatgtaattaaacctgaccagaatatagcaatgtatgtcaaaaagaaaatgtatagaacattaaagagtaacagaaaaaaaagaatgaaaagatataggctataaacacagttattatttgggcaagtgtttaattgtggatatatattaaaaaataattcagcttttccttgtcaaaaatggagaacatctgaaatttttctaagcaaggagaacggtatttgcaaaggaactttttttggagatgaatctattttatgcattgtttccaaatattccagaaaagataatatttgaaggtaagaacttgatcaggagacttaacataatccagaaaggaagtgatgaagcactgagctaggatggtagcagtaagactgaaaaggatgaggactaaactgtatcttgctgactgactcgcagcctgtttgtttaaggatgtatcccctccactgcacactataaccaggtacatccttttaaaaaaattgaatactgatttggaaaccggatgttcaaaaatttcatcacattgatatttaagactttccataatctgattactaactctctaatctgagcttttttttttcctccagcataaattctccatccatctaggatattgcctataccattcacaaaacaagctactccttaatacttgccttcatttgtttgcttatgttgttaacctgagactgtcctctgtcttacaaaaacataatcaaatcctcttcttcagggctcatgttaaccccatctcctgagtaaattctcagtcaacctcgccaacacttacctattgcttctctcaacttctacagcagctactttctacagaattcattttggcaattaatcctatttttcctcccactgctatatgttctatgtgaatgtcttccatagtcaatgacaaattcttacatataaaaattttattatatattcctttcactatcaggtatgggtataatgatcaatcaacacttcgaaggtgaattattatgatctctcataattcatgtacatttatatagtatatatttacatagtctgtagtttttctagaattacaaggttattattctaggttgtattatctgttacacaagactaagaatcaagtcataagctttttctctatccccatgtatgtccactagaagtattaataggaatcaactgatttttctacatatttaaaatctctgtatataatatttattcaaagattttttttttttttttttttttaaagagacagggtccttctatgttgcccaggccggtctcaaacgatccttccaccttagccacccaagcatctgggatgagataaagatgtttgttagtaggtttaagtcccataattcccttacttgcaaagagagagagaaaagtcggttagagagtaaatactttggtcatgcacagtagctcatgcctataattctagcactttgggaggccaaggtgtggatcacttgatgagcccagttcaagaccagcctgaacaaaatggtgaaaccctgtctctacaaaaaactggccagatgaggtggcatgcagctgtagtccccaatactcaggatgctgaggtgggaggatcacttaagcttgggagattgaggctacagagagctgtaattgtgccactgtactccagcctgggtgacagagtgagatcttgtcttaaaaaacaaaaaacttaaagaaaaaagaaaaaaaagagtaaatatttcatcttttaaaattgtgcttataaatgcagaaataacctattttttaagaagggactgaagaaaggtttcagagaagaaaagcatattgtcagggtgggacaatatttgcagcatagaataaggtagaattctaggagaggcttcttaggacacaggctggcacttctcccatcccaccacagagaataagaaggaattgatcagaagtaggataagcccaagacataggggcaaatgcacacgtcctccatgtgggaactactcccactctggaactgagcaagctagtaaactcaagagaggttcatacaaattgtcaaaatgttagcaagaccatgactcctggacagacaaactgttttactcaaagtaaaataaaatgcagccctgagacaatgtatgtatcctatattattttttaaagtgcatgtttcttgtatatatctcaatctacaatccttagaaatccatcaaaccataattgtgattagagatgtactatgcttgaaaaaccttatttttacttacatttctacagcactacattggcacctatatattaatagttcttatgtgatccacccaaagaagggtgaacgtcaaatattgctatccacattctacaggccttgtggagtttccattctccatgtcaaaggatacctagtaatttaagtgctggaaatggggccccaaatcaggtctcatcaccataaatctaggggaaatgttataatataggggtgggggaggggagtaatatttatgtgatagtcgagacacttgagttttattcttgatacttaactactactacctagtaaggcaaccttaaaaagatcactgaatttctaaaggcttcatttttctcacctaaaaaaagagaaatctcgactagatgtttcagatgttcacttaaaaagttaagtcataaaatacaagcactaggagatataagataaataagactaagctctttcccctaaaataacttactgatcagtgaatgagacatgcacaggaacaagataaccaagaaacaatgtgttaacagcagaagataatagatttaagaagggcagagaggactaatttagcaaggaatagggatgggaattaaaatctgaattaagtcttagaaaagtatccaggcaaatagaggaccaaaggacattccaatcgaagggaacagcataaacaaagcctcagagtggaaaagcagcataggttgtacagggaattataaacagttcagtattgctgatacataattgtagagcagaagagagatcctgcaagagttgaaagtagaggccagattgaagagatctatgatgtattaagaaagctgaactttatccagtaggcaatgatgatccaaggcagggctttcacaggggaatggcatagttatgatataattttagaaagaccactttgatacccgcgtgaagaaagagtatgagtggtacaaactagaaacagagaagctagttaagaatctacagcagatatgatgaggcctcattctggggtgattatagaaaaggatcataggttcaagaaatatgcagaatcagcaggactagaaatggattgggagtggggtaaagatgtgaaggagaaaaaaaaggcatggaaaggatccatgtttttgatcaggcagagacagaactcagatactgagtacaaaggaagaaatagacaaaattatcttgagtttatcttaggacgtacctggtcaaaaaatatctaggtagagatgtccagcagccaattgaacagagtaacctaatgctcaggagagaggcctagcctagagatttaagtgtgggagtaagctgcacacaaggttgcaactgaaaccccaaaagtcaacgtgtccgcccaagagaaagtacaaagtgtgaagggtcttcaaccagaaccctgttaaataccagaactgtgcattagcctaaggggtaggggggaacaggaaagaggtatatcccagaacacagtgggagtggtcaaaaaggagatggtgatcaacagtataaaatgcagcccagatataaatccaggaaaaataagaactgaaagatgtctactagacttactgacagggttcatgacatgatctcccaaaagatagcaccttagcatttgagaaaacagcaaaagcaggaaggccattcttaccttcctctcatccttctcacgtgagacaggtcataaaacttagcaagaattttttgaccttcccctgaaataggtcataagatccccatatgagagatgcccatactatacccagagggaaggaatatccttattcctgaagacacagggacagagaaaagaatctgacaaacaagccttactaagttcccttcagtttattaccattataagcccttagtccttatgactatccacctcttcatcatccctaaacataaaaatacacaagtttggccaggcatggtggctcatgcctgtaattccagcactttgggaggctaaggcaggtggatcacctgaggtcacgagtttgagaccagcctggccaacatggtgaaaccccatctctactaaaaaaaaaatacaaaaattagccaggcatggtggtgtgcgcctatgatcccagctacttgggaggctgaggcaggagaatcacttgaacccggaaggcggaggttgcagtgagccaagatcatgccattgcactccagcccgggggacagagtgagactgtctaaaaaaaaaaaaatttatgtgtttttttgggtcttcaattccaaaggctgcattgtcacataaaagttttattacttaaatttgtgtgtttttctcttgttaatcttccttttgttataggagcctcagccatgaacctgaaatggtaagaaaagatatttcttttcccctacattagcaattaagtggtcactcaataatttattataagtagtttcaatcaagtgagtaagggaggaagctagactgcagtgggatacgaagtggaaacaatgagtataacactatctttttgaaaaatttaaatcaggagggaagcaattcaaaatttaattaagattggaagttctcaaacccctttacagttctcatactctgttcttttcatataaataaaaagcctattttggtaaaatttcattaaaacccatattgattaaatatgaagtaatatctttaattatcagaaaaatgagggatatatatatccctttggtagctacaatttgatatatatatatatatatatatatatatatatatatatatatatatatataacatttcccaacataccttagaaataccttgtaaaattatctttttaaaaatgtactaaagggggctagggcaaaggaaaaagcaatggtgaagtaaccctctcttgcaccaattgttccttccttaattcctcataaagacattcttcattgccctctgcctggaatattcttcttctctgttttaatttgcttaactcctactcactcttcaaggacctgctcaaagtccaccccacagaatcacagaatgtcagggacaaaaagggccttacaaatccactgaatccaaatgtttctaacatgctgatgaagaaactacataaagatcagagtttcagagaataatctgcccaaggtcctattacttgcagcttgcggccaggttggaatttgaactacttcttcagctagtatccatttcagtagactcattctttcctcacataactgttattacagaattgaagattgcggtaagtcaagctttagtaataatcaatttctaaaaatttatttagagtaagatccatgttactaatactttttaaaactaaggagccaacctacaacttacttgttagtttgagtcaactacctacagctacttgattatacaagattacagatgtcagatagtatttatttcatggataaataagctgactgtcagtcactaaataggatccttccccaagagtgcagcatttatttcagcctctgccagtggaagtgttggagcagatgttggcagactgtgacatacagtatgtctttaaaactcgttggggtgtgaaatttcataaggtcaaaaaatgctgcattttgatcagcagatacaagaattctgtacttttataaattatttcagaaaaaccaataacatttgctggtaaaatggataaactaaaaagctacactggctttaggtagggcatttagataatgtatgctgcttatgttctaaaagctaatttctatcactttaaagcaaatgttcactcaaaaagtctttaaaatgaaaatctgttcttaagtcaatacaaaatacaatatattatttcagttgacaatagggtttaaaaaataattttctattgaaagaaaaccattattatctaatgagcattttggtgggaaaaaagatgttttccttaactaacacacacacttcatagtgatctcatttaaaaaatatctatattaagaatccactaatataaacagagaaagcttttttttttaagttagtatccatatcgttcaaatgacttcacaaatcttttaaccctttggtttattgttttatctttttcttaaaaaaaatacagtagccattctaacccactaataagggctaacctgaattaaacaataggagtaaaaaaagatcacggcttttataatggtaaaatgaaatttgtaacattcaaagacttattttcttgaattttttgttatattattgcattttttagcttcaaatttcccttgtatctttttttcccaaatatggctaatagataacatataaccaaaatcaaaattaaggatattgtctcgttaaagattttagcttaataatacagacgagctagatcttaggcaagtttaacttagcgtaatttaaaacactttacttctaaattaacacaaagattctctaattgattaatcaatatatttgaagagttggaagagcctggtaataacataacaataataatcattgtcattatcatcattgtcatctttcagtttattttgtgctatgttcatgcaaatacaaaatttctaagtaagttttaaacatttttgttagatatttgtaaggaagaaaaatttaactacgaacataaaatctccccagaagatgatttctaatataaatcacctgtttctcatcacacaatcaaaagagctaagattatgacaggaaactgattaaagtgcattaagtaccacaacatcttataatcatgctaaatctaacaaccaagttcaaaggtccttgtttttatgttataaacaaaaacttgaagtatgtatttggggaattatatttatcacattcaagttctacataaaaatattaaactctattgcattgtataagaccaaatgttatcgataacctctatgctaagggactgaaattctatcaaagctgaaaatttctctattaaatataaacccaaactttttcacaggtttctcatatagcctaagatatctgacacataaaatcataaaaataaataaatacaagatgaatcaacaattataattaacttacttgccactgaaaagttgttgaggggataaggtaaatccacatcttgaggtttctctttatatcctatgaatgagccatctgtcttcaaaaggaagtatcttggcctccagttttttatatattctcctacatgaggaaagcacgcatgttaatgctgaaaaaaatgaacagcagcttttatgcaaaaaataaattatggtacaatatatgtcctacaacactggcctccaaaaatttagttactcaattttcttttaacttagcttacaaaagaaaatacataagcctacaattaagattcaataaaaacccaaacatgttttgtttttaatgatttcacactttgataattcatttgcaccattattccttcagagaatcatctgagtacacattttgttcagtttttcattttatcagatggttgttagagcatattttcagctgttttaaaaagccttggtaaatcatccacacagtatcaatgaatttccattaaaaacatttatcataagagaggcaagaaatagatgtttctcttccactaattgtgtcttttttttttcaaaaaagaaagaaaaaagtctattttcattaataaatcttgactgtaacttgtttaagcaacattttattgttcttcatagaaaaataacctttttgcaatgctgtacttaagaaaacgaaagaacatgggttaacagggctttcaacgatacgcaaactcacacatacacaaacatagtaactattaatatatggtacagtgtcaagaacataatagtcaataaatgtatactttattagaacttaacataaggtaccacctagccaccaaaatacacatttttagcaactacattacaatttgcttacctactaaaggacaacttctaattttaagcaacagaggtgctccatgatgctacaagagctagaaggctatctggtattgattcagttctctactggttatttctacctgctgattaaatctcaaatgcttaggcaaagaagtacaaaaaaattgcaaacagttcaattttccctacaaatcagcttcttcttgtgacccaaactcaaacccaacatctgaaggttcccctccttatcacagttaggtcaatactgccatcacaagtctctctgattgagcccaatcaactgaacccttaatacgttatatctactcttctgttaatactgtttttccccactctacacattccccacttccatcctaatgtatctatcacctccagattaatcttgtgtgtaccactttatcacttttctgctcaaaatatcctgtgactccttactgcttactgtaaagtccagtctcttaccataaaatgtaatccaaatcttttactataaagggcaatctcaccccaacatgtatttcagatgtggaatcattcctctgaatcagcaattcttaaacttcttagaatctctttatatccttaaatattacttagagcaccaacaaattatgtagatttttatctatgtttactttattcgaaattgaaaatagattttataaatgttttacttcacttgaaaataaatttattacatataacaaataacatatttttataaaaaataactattttctttaaagaaagaaaaatgcaaagaccagcactgctttccatttttacaaatctatttaatgtctggcttaatagaagacagcttaattttcttagctgttcctgccttcaacatcctgctgcagtatgttgttttggtttaaatttagggggaaaaaatctggctcaaagagatatgaagctgaaaaagggaaaaatattcagatagttatggatatcattctttgatactacaccagaattcaacaagggttagtttctaaaaggttagttgcaatgtagaacttgaaacttttaacaatgaactttctgtactattatgtgaaaatccattgatctatactggactttgaatgaatctttaacactgtctataattttataacattatgcattggtcacatagaaaaccctggcttatcgtgctatgctgatcttcctaatgttgacacatttcattatacaatcacatttgttatcaataccagtctcatgaaaaaagtaaacattggaaagctgacaagctcataacgagagatctgttttcccaaatttaatctttgcttaaaagctcaatttccatcagtgacagcatatactgtcagttgttttccttgaggtgataatactctacatgcccaagctggtgcccaccacttaatgctcaatcatgatttattaaacaaatgaataaatagaggatacgtagatcagtatcctccacataagtatgtaagggcaaaaaagaaatttaaagaaaaaagaaaaaaaagtgatgctcttcactttattttactgaaaaaagacggccctaatattaataagcacatgacttaataaggcaatttataaaactagaatgcctaatacacaattcccacgttgaaaaataaaataattccttaattgctcttattttatttttccatttcatttattcctatataaaattcaaaatcattaggtattaattctccaattaatgacatatttagacttcaaatgttgttgtacagcaataagagatttatactggtacaatatgctgtaactctgtaaaggtaaatcacaatagtttaataattataccaaaaataaaatgaatcagatccatttgaaaaatacaaaagaaaacacggaataacaccatttcttcttcttttaaaatagtactgaatacacttattcaagaaatgtaaaattaaaagaaatcaaattttcatttctaagcataatttccctctatgtacatcctcagatgaaaaacacaaaaacatcattatataaatcttgtatcttttttattaagcagatttttaaacttttaaaatattttctatgatctatagcaggacttctggttgccaaaaagctatttaaaaataaatgtattatgcatccttcaaacgtaatacagtataccaagatagtgatgtactcactcacatagaagaaaaattttaaagaatttcccttcttccttaaaaaagtattatttctcacaaactttttaaataattttaaattgatttggttaatcaacaattatactgtgatactaagccagaagtagatctcaaacttccaataaagactactaaatctattttcttgtcatttttcacctataatatgaattaactttctgagaagatgcttagaatgcattcattattaatttgttacagaggctggaccaaaaaaaaaaaaaaagacaacttaatagagcttaattccagtattataccagatttcaggtgcctagctgttcgaaaaggaactgaacactttcatctctagctcagaagttgaggcagtgtgagttcagataaggcacgtgttgtcaggttgttctaaaatatggacagaaagtcctagcttttatgaggctaagtacccagaacaaagtacactccctgccaccaatccttttaagacggactgctaaaagtcaatcttttattttaaacacagaatttgcatctaagtttacacatgatgcatcaaacccaaattgcatcatacttttatgtttatggcccataggttttaaccaatttaaaacacaacctggttaaaatggaaagtcttgtcaaaaaagaagcatttatgatgtaccaagtatcccaaagagattgttcaatggacacccaccaatatacatccaaatagtaaatgtatcgtcaagataaaccttcagcaagcactgcagtcacaactggttaagacttccaacccaacctcttccactatatatatatatatatatatatatatatatatatatatatatatataatcttcatgggtgcttccacttctttctcacactcttttgctggaagctatacctatgttgaagtatgctgttatcaataccaaaacaaatacatttcccagcaaggattctggtatactggcttctggtagtgaggtgagtggtggaccctcgaatgatgtacgcaccctaatcccaggaacctgtgaatattaccttatggtaaaaaagaatgactattactttatatggcaacacatgtgattaacaattaaggattctgagaagatggacttttcccctggagaattatctaggtaagccctaaatccaattacaaatgtccttttaagagtaaactgaacacacagagaaaaggaagggggaacgtggccacagaagcaaagattggaactatgggccaaaagccaaggagcacctagagccaccagaagcaagaagagacaacaagtgggttctcccctggagccttctcagtgagtgtgaacctgctgacaccttgatttctaacttctggcctccagaattgtggcagaataaatttctgttgttttatgccacccactttttattaatttgtgacagcagtcctaggaaatacagctcctaaacactatgaccaatggcttgctaacagagctaaaaactactacttactcattgagttcttggcataggacatgtacagattcagttagcaccttctgaatgcaaagaggaaaatccacattactactgtaaatggtagagaatcctacttgtaaattatgagggtggaagaaactgtttgctagaattcatggttttacttagtcctaataacttcagattctggacctttgccacctttcttacttcacttaataacttattccctgtagttaaaacaaacgatctcaatgattttgagtaaattttgaccatagaaaacatcctgaatttccacagctgagtaaaaatactgcattattttggacctcaggcttagtctattttttttttttttttgagacacagtcttgctctgtcaccaggctggagtgtagtggtgcaatcttggctcactgcaacctctgcctcccaggttcaagcgattctcctgcctcagcctcccgagtagctgggattacaggtgcgcaccaccacacccacccattttttgtatttttagtagagacagggtttcaccatgttggccaggatggtctcgatcccttgacctcatgatccacctgccttggcatcccaaagtggtgggattacaggcgtgagccactgcgcccggccaggcttagtctttaataacaacctgagatgggacctggtatgagtttagactcatgctcactttccacctaaaagatctggataggatattcaaataaatcatctttatcatgaattatatactctcaaaccagagctcaccaaaaagttgacagtgttcacttcctaccattcacctgataacaacaaactgtatttttacttaataatcttcaacctaaattagtccatatataaacattttatttcattattcatcaacactctactgagaatcacattttgattttttaaaagcttaagtcgtaagtgtaaaagctgaagtcgtaagcgccaaggcagaagctagaagtgtacatctctggactaaacagtgattgattaaaatgtgcaaatagtctttcatctagaataactaaggaatatctagatttgttcagacatgcaaatggaaaagatcttcagaaataattcagccttgtgacctcacaaatagatcatgttgatgaatatctgatacctttttaaggctacattgtgttccagaacctagttctaattctaacttcatgaaaggtagaaagatgtgaagtgagctgggtactggttgagaatactgcagaaatactcatctctaccttcaactgtcatggactatgctaaaaacacaatcgggtagattcactgagatgtaactaaacaaatatagatacaatccaattgaaaagaaatctataaaaccatagcactatttttcacaaatcccataaaattcatttgaaattcatttagttcatttagaatttaattagaaacaacacaatcaccattttaaaaatatgcttcttacctaagaaaaaatgcaaaaaaaaaaaaaaaagaccctaattatcaagagttgcataacaaacaaaaattctaattttccgatacaggtgctagctttttaagataccaatgctcactcaaacttgttgtaacatagtcttcaaagctaatcactgcataaggaagacggtgggagcatcctcacatgtatgtcaggaatagatgttactgttttatcataaagctaaaacaagtataagctcagctttcctcagaatgctgtattttaaatatttaattttcatgtttaatcacaagcaaagtcacaaagtttttaccatgtatgattatttgtccttatacatctctgaagaaaaaaatgtatagattacatctatacttaatgcatgcgttaatgaaaaaataacctctttcgcaatctttattatttacagagggagagagccatagaatttatgcaaaaaaaaaaaaaaaaaagctggccatactgtcaatgtgaaaagcatgtggtcacattttcagaataaaagaaattttaatttaaaccaatgctatgttgtgtaacaaaaggtacaacaaattgttgtgatcaatacgaggtcaacaaacttctcaaattagccttcagtttctttcccactcaacctcatcattaaaatgctccaggcagaacaatgtaatggttaagagcaaggactctggagtcacacagcttgggtttgaatcctaatcacatcatttattagatgcatgaacctaacctctttacatctcagggtcctcatctgaaaaacagaaatcatagtttttatccaccaaagggtttttgtaaggacataatgtaaaaagcccttagaacattacctgacatatttcaagtatttgatttggttgttagcaagtgatactaatactaataccacttatgataatataatttataatccaactacaaaccacacattaaatgttctactaatcagtactgcacttattcagaagtatttacataaatgaggcaacgatgaattttttaagtctctttggctagtgtcaggtatataaaacatgtattttatgtaaggaaatgaagaggttatccaacatctaaacacagtattaatttgactaatacttttagttcttttgaatatcaggatatcagaggggtaaactagtcttccaaagaaaagagcagaagtcagattcttctgaatttttataaatgatacacacaaatgtacagtaccataaaaatataaacattttatgaattttcaaagagcagctttaaaccagaaaaaggcagttttcagtaaaaataaatgtacatgcttcaagaaactatctttggcaatactccttaaataaaagtcttcatgagccaatttttacctaagacaaaaacagatacaatgttaatttcagcataaaatctatttaatttcatcattcacaatgtagtaaatatttagttgcctgttgacagacaccaaattttcacatatgaactacctaaaagaatatggcaaaatcttttctactaatggatttcataaataaatattagcacaaaaaatactgtatagtccataattatgtgatacatcttaaatatcagtaatcaattatagttgctgaagaaatgcatgacaataaatataataagacatttgcagtatttaaaattactgattacagttttatacagaggagtacaattagttctgagtggaagcctattcatgtctcttagagaatcaaagaaatgtgcttctcactcaacttatcataaccatgttttattgatgtcttaaaaataatcctgggccaggcgtggttgctcactcctgtaatcccagcactttgggaggctgaggcaggcggatcacttgaggccaggagtcagagaccagcctggccaacatggcaagaccgtctctactaaaaatataaaaattagccgggcgtggtggcggggcccttataatcccagctactcgggaggctgaggcaggagaattgtttgaacccaggaagcgggaggttgcagtgagccgagattgcaccactgcactccaatctcagcaacacagcaagactccatctcaaaaaaaaaaaaaaaaaagaaaaagaaaaatatcctgaagaattttgttcatattatctacattgcaataaactagcgtaagttttcaactgcacagggacaatatgaaatgtaactttttaaagtgattttgcatattataggtacttattaaatacatatattgattagattttccaactcctaaaaacctgaatttttaggttatcatttatcttttattgagtcttgaaacatgttctttccttgccctcaggcaactgaaaagtgttaaattctattctgatgtctatgcaatgtctttgaccacttgtcatcaaccagctttggatgtgtgttgatagtctgtgaaaattgagcaatgtctaagcattatgaactcctgcccagctcactcattttaaggtgctgctgctcaagaccacctagatcaaaaaagccactttaaacatctttacttagatttaagaaaaacgggctaacagttattcaatcaaaaatactcggtgagtgtcaaaatatgtacaagtactaagaaggcagcaataaatgatacaagcatagtcccagccctcatggagctttaataaatgatacaagcatagtcccagccctcgtggagctttaagtctagtaggcagctgtgagaggtggagaagaaaaggggatgagttgactaattaaaattttaagtgaaaatttctcccatttctttaaccattcttagtgatccagaatgtcatactggggatggcaatagcccctattctttggcatttctaaatagcatctcatgtggattcagaaaaaggtagtcgatgatatttgttggtttgacgtctaactgtggggaagggactgggaagaatatcagcgtaggattcttcgatttgctgctatgttgattccaagatgaggcactgcatcatcctgcattcctccttgaagcctcacaataacacaagcaaaagcaaggcaatagctttactaccctttcatctagaataataaataacacatctttacgtttcaggttttaagattattgcccattcttgtctttctcactgatttctgcataatattgattaataaggtcagatttttaaacacctgaatttctctttatggttatttcacccggtaaactctgggtcactgagatgtttgtctgctcttggactggtcaatgttgccactgcagctggccacacggaaggtgtttacaattttcgtgattttgtgttgtgcttccgagatgtcttaaaggctttccagatgtacccacattcctctgctttgccacatatgttccctcatgattattttgaaaagtatattatagtcaagaaactctcattctaatgcataatgcatgaacttgtcatttttacattaagtacagttttcacttcatcttagccaaaagtccgagaagcaatattatgaagtatagttttcatatcggcttcctaaagaaagctggggtccatgttttgctttgaagctgatgagatgatgagaaaaatacctatgcattgaataccaaccacaagatgttagaatggcaacttctctaagatctcagtatggttggtttgttagtacttttatctgctttacaattttcttttgttttccagaaaactgcataattatcatctacccttaagtattctggtatttgtttcatgatattcggtaaattgactaatcaaatccttgttccacttgtttttaggaaacattacatttttaaccaaagtgatgcttttaaattattctcttaaacacaataacatcttaatagagttacagtacccagttttactctaagagaaaagcaaggtgagtaaggaaggcacaggggcattgggtggagacacagagaacaaagcatccacacggactagccaacagaaagcatcctggcaatttaatgaagaataaacggtgactttagtttacatagcagtaggtatgttgtggagaattactcaatctgtacgcagcctcctgctgggttaagtgtgagctaagttattattttgcttacatctgcacccttgtaggctgtgaaagcagagctttctttttaaaaatctgtttactgcattagagcagagtttccagttccacacaccggatttaacacaaagtcattcttgcaccattttcaaaaagtagtcatagaattttaaactattataaatatagaccaatttaaaaatataatttcatcagaaactttaaaacttccttattgtaaatatttcccattttaccaccttatattatctaaatataatatcatacatggcatatacactgcagtaaataaccttaatgaataccaaatatggaagcagtgagtccataacgcaagaaactaccacagaggtgggcaataaccattaattcaatgactaaataaacctaccaccatttgaaataaagactatactcctgtcagaaaagctctctcaaacagagaagtctctctataacacaacctcgtatggttcaatccacttttctgttagaacatgcctgatggatatgacaaataacaataatggtgcctcactacagcactaactgggagtttgcagagaaggcaggctgtagtgcttgctcatcaggaggtggtctgtgccatctgaaaaaactctcaggtggttcaacccacccatcccactcctatactaacatcaatgctctacagaataaaaactaataggactttatcttagactcttaccaaggagtttttcctctaagaaaagtctagtagtatggaccctaaaatggcactgcatcaaaccgagagctccactattctgaggatgaatccatgcccttcataactcctctcttccctcctttgttctccttagacaatgtactgattgagtcttgtaccacagcatgttaagtggtgaaaggaagaagaggtaagagcaaggaagaaaaggaaacatgaatgtcctcagccaggcactgtgctcaggcttcacttacagagccctcttcacagcaacactgagactggtgctgcagtattctcacttttcacagagagccatgctgaggctctgagacactgggacaagctagtaaaggacagagttaagattcaaagagtggttgggagcgcacactctcaagctggactgcctgggttcaaatgccagttctgtcactcactagctgtgtgagagacagtgaatgctgtttaatctctctgggtctcagcttcctcttctggaaaatggggacaataataatggagaaataaattaaagtttgtaaagcatgtagaacaacatctagctcactgcaagcattatgtaagcatttgttaactgaataaaacatctcagagtaaggctaaggaaaccaatcaaaggagatttagtgagtacctaatatgtacaatatgttagactacacaaaagtaactagagtgtttaaaataaaatggaatttctttaatttgtctagactatcactattgcacattagctgagcaaaggaggtattgattttttgtggataaaatttctatttttgttattcactttgcttatgtcctgtcttcatccctcattactaagaataatgaactgagtgtcgcttatgtttaactcattgaaatctctagtgaaagactgacaataccaactgtcacagaaatcatctttcttaattcaataacaactaactatagggcaaaaaaatcaaaagccttccactgaatttactactaaacattgcaatgtttctttcaaattataagaaagttactccatacaaaaagaaaaaaggacacaactcattattctgggtttttttaattttagattcagaaggtacatgtgcaggtttgttacatggatatacagcatgatgctgaacacctcattattttgacatcaggccttccccactcttcctttcttattacaaaaattaatcatcatctaatccccaatattctgaattcaaagaagtgttaagtcacacatcaatatcaggtctttacctctactttaaaaacgtatgcttttataagtgcacaggaataagtgtatttcaacttctagtatatttatacatagccactgcatatacagcaaagtaaattactcttgattcatattatatttgaaagatgtgattatgcttaagtttttaaaactgaagggaatctatgcttccattttaatgaatactgctctatattaaaaagtgtggcttcaaataattttgaatactagaatatctgctatcaaagacacaaaaactaaaacgcacccgccaagtaaaatcatcttaacttttccaggtaattttcttatactctctatgaacccatctaatttgacaatttatggccagtcatgttaacattttcttagactagaactgaacatgtttaaatgatatcgtcgaattgaagggcacaaacattttaaaagaacacaacaaatcaaagaaatgcaaccacaaatcaaacactattcaattactcaaataaataattttgagtactccccaaagaaagcttatagataatataaatagaaaagctgcttctcaatgttaaaaatgaatttacttaccttggccctctgagggcagtattacctaacacatagaaatttcagaaaacaatctttacctatcatactaataaaaacaaatttcttaaaatgaaatgggcatatttgctcattatacgtacatatttctttcctcatcattatctgtacctcagtaagcataataatgctgttttcaaatgtttccagtgactttgaaaggaaagattttcttaaaaccaaggcatcaggaaggaaaatgcatggaatcatcagtatcactgaagtcatccaaaatacaataaaataaaaaagtatataagaattttacattgcataaataatctaagttcctgttttgctctctgtagaataatttgtttttaaaaactgcaggacatctaaatatacaatctttcagtaaagacaaagtaatttgaggaggataacaattcagttccaaagtgtcttcttaaaagcagccaataccaatacactcgtttgttacaaatcactcatttattaatgaaatataatgcaaatgacaaattggcaatgtggagttgaagcactcactgagttttcataactgattcttacactaagaatctttacatagcataaggattatccattctagaatctaagtcaatcaatgtacactgggtgttttattccttttgctatttcacagaaaggaaaagttttctagcattcacttatcaaagttttttttttatatacaaaacactgagtaacttaccctatataatccagtggtatgatagacctttactttaagaatataaaaagtgctaatctttatgtcagagttttacatacaagttaattagtaactatccaactttccaggtcccaccacttctcccatatagaaaaaaaaaaacaaaacctagcattaaaagaaaaaaaaaaagagcttctattgaaggaagataaaaattattacaagcaggtaaacagcaaatttactttgacacagcaagatctcacgtggatgacactgattgccatttagtaaaaatgtgttttatttaggttttgtatttactttttcaaaaaagtccttgcttctataattcaaagtatagtagttctccactcaggaactatgccattatttagcataactttgaataaattagatttttaaaatttgaactactaaacagtcttattctttttaaagtatataatatcatggatattttaagatcataaaaatttaaattctatttaaaatccttctttactaaatcaaaaggtaaaaggaactagcttaacagttgaacatactacaaattcagggaagggaatgaaggtcattttataaaattcttttctataataaatatatatacttacgtttaaatatctcttcaaaaagatgccaggaaacaacaactgctgttctatgcgttcttccttagaagtataaaattatgaactttgatgctgtgttccagtctcaagcaaataagtgacttgcttggccaaaaaaatagacaaacttcacgatttatgcttttcctgcctttgtatcttaatcatcttctgttctaaaaagtgctaccacgtttacccacatctttaatcagatttttttgaactaaaacacattaaaaaatttaagccaaaacatttagcaagatgccttaaacaatatgtcagacagtgaaatactctgttttcaacatactggccaatatttttaaaaattgctattcatgcagtattttgatgaggcacaattcaaatatacattaaagctagaagtttctgaagttttctgaattatcctgaaaatataccaagtacggtttcatttatttgtgaaaatgtccttacagtttcatcctcatttgtgatatatttcataggctatggatatttccacttctttggtactgtaagttgttttttataaaaaacaacaaaaattatttgtttataaatttagactgtaacacttaactatctgtctagaaatactggcatccatcaccatgtgccattaaacattaaaatatccttatatgaagctactagcactccattcaaaagtgagcgttatttttctagtgtaaccaatttattcttttaaaccaaaatagaagttcttagtcactataccccgtcctatgaaagactcttaaatactaaattaggtggctctcccaggtacaacaacccttgactcatcatccaaaattattcagtaatatttactagcgtggaatgccggatgaaaacaatttgaaaagaaaaatgtaaagaaccaccacctacatctgtatgggaattaatcatacttttaggtttactgacttcctcatgtcgaccaaagccatatcctctttacttctctaagaaaacacttctgcttatctcagcactttcatccctatgtgagcttaattagtttcttcatctgcaaaataaagagttgtgacaatcaaataatgctttaaacctccatgaggagaagaaatattatttttagctaggtgttccaaagtctcattttaaagataataacccaaatacagcttaagtactggccgtagcagagaaaagttcagctccaaaataaactgaggttacttttttaagtatgaaaaataattttgtagaacaaaatgtgaaatcagctggccaggcacagtggctcacgcctgtaatcccagcactttgggaggccaaggcgggtggttcacaaggtcaggagttacagacaagcctggccaacaaagtgaaaccccgtctctactaaaaatacaaaaattagccaggtgtggtggcacgtgcctgtagtcccagctactcgggaggctgaggcaggagaatcgcttgaaacccttgaacccaggaggtggaggttgcagggagctcagaccatgccattgcactccagcctgggtgacggagtgagactccatctcaaaaacaaacaaacaaaagaacaaaatttgaaatcatcatcactaaataaccactaataccatacatccgaaatacttttatccaactgttttctttatattttctttaaataatttatttccctccacatttataaaacaatcatatatccctaaataaacataaggttccaagaaacaaccttctatctgtgaccattctctcaaacagcctctacagcttggtattcttattctatgatagtcagagcattatataaatactccaattgtaatagctacagagctctagacttgcacataacacctaataaaaatactaacagctactactgaattcattcaagacattctaaatatattatctcattttgttttcacaagatccttgaatagcaagtattgtttccttctttcaaaagatgaagaaattcacatttaaatagtttaagtgactatgagtaaattcactcatctaagttaagtgatatttaaatctggtctttgtaacttcaaagacattctgcctttaatatttcaatcaccttaatatgtatacttgcctgtactactaagatttagcaaatggctctgaaagaatcagaagtaacatatcattaataaagcatagacctgcaagtttgcttgtgtataaaagttggtataagcttgcttttcccagtcactcattaatatcctgaccactgacaaaccataccctctcactttaataacaaacaccttctacttaaaaaatggcatactgctcgcctccaaacttggtagggatattaggattgactatgaaactgtaaatacatggacataatcctacacacaaatatggatatattcacggccacctatataaaagaaataaatacatgagacaaaggaaaagtcaaggtggctgatgattttctatgccttttcagcaaacacggattagagtcacttgagtaaaaactgacggtgagagagaaagttttttctagatagacctgacctctatttctttatgaaaagcagaaaataacagataaccttcctttaattctttcagaaagacattactctggacacgaagctctgtcagtacgttggcctttcaaccatgctttgggcaatttctgcttgataattatgcaacaaaaccttaaatgttttaggaaggcatgagttccaaaagtcaacataagcactttttaattctccacacatatttttttttgaaatgttaagtccacattgggcggaaaaaagaaaaaaggagaaaagtcagagcttctcttttttgttttctagttattccattcatattgattggttctgaaatgttacaaaaatttttggtgttctagaaaataagtaatatggaaaatttttacctaaggtcactgtttcttctcaattatttaaggtgaaagtaataaaccagacatttaagtaaacatgctcacttccatctaaatataaatgttatcacagcatttgaaaacattccagatatatcaaatctctaacacctaatgtcaagaatgtatcagaaggaaatatacaaccaactcattaatgcttgataaaaatgcacgcttgtcatttatagaatccatgacaaccatgagaaaaagagtatgtactgatcaaaaaggccaggttactatataactttgtttcacaactaacgacatttaagttcaaagtattatggaattacttacaaaataaactgggtactctctacctcacccctagtggtaggctatgaaacaaatcgattcagtttaaaatagtttatgtgccgactagtgttaaaacgttcatgtatgcattaagatcacaccaaatcacctgactgattccttcatcaaaagctcctcttggcagttagcagtacacacctaacattagccaaacaggttatctaccatcaacacggagaaataagaaactttgtattgccatttaaagaagttgctttctaaaactagacatgaataagggagagaagaggaagtattaaacccctaaactaattaacgaaataagggaggggggatgcaggaaaacaatgataattagtatgtacccttggttaaccaaatccacacatacattcattctgtatatgcacaaacatcagcagcatcataaaccgtctcaagttctagccattattcagttcgacatctgcacatgtttatgcgtctctccaaacaacctcttgaacaccctgctggagctgtcatttttttcttctccctatctggcagatggcaagtcaacaatcggcatcaacagcagccgaatatctccccctccatcctacccccctaaacagacacaataataacttctttgtgcttccctacaatgcagctgcttaaaccatttcgctacaaggctgctttgccttaataaaaaaaaaaaaaaaaaaaaaaaaaaaatcccttctgtcaagtctaaaaagcagcataatgttaagcaagctaaagccacagcacagctgcaaacgggcagacacattgacagctcctcccttaacaaagccctgtgaattgaagggggttcatctgaggctcacacagtaattagtataaaaaagtccgacagcctctattatgctaagggaaaaaaaaactggacagaactgggctgctgttttgcgtcaagagttctgctgcagagtagataaatcatgttgggttttttcctctctttttaaagacagtaataaggaggatgagagaagctaatttgaaaacttggacacagtaattgtaccatatggtgagcatttatcctttctgaaatgcacgctaacagtcacttacatgcacactgctttgttttacagttgttattctctctaccatattcataaaatggatttgaatatctgatactcaagataagttgtgtgtaattagcaagagaactgcctaggtttaatttattggccttgcactgcaatctagtaaaatgcaaaacaaaattaaacaatgtgtccactttgtacagatattttttctttaactcaacaaaacactaatgaatacaagttcattggagtgtttctaagttaaggcacagtgtattttgaaaattccaacagaataaactatagctgttgataagatttctgatatgtcaccataagaataatttttcagaaagatcacctggtttaattttgtatttcactgaagcagatgtaactcttcctcatatacatcagtaaacctagatgcaagagaaatttccttgcatatgtcctaaaaattttaggaaaagaaattctgtcatttattaaatagttattaagtactctgtgccaagcacctatctggcacggggaggagaatatagaaaagctttcacattttttttaaatctaaacataaattgacttattttgtctacttcaaaattctataaaaatctactatttgaagaaagactttaataacactaatagtacactggttatcatggcacaatatatatcaaaatatatagggaacaagattagtttaatcagaagtaaattcactgtaatgacatctgtgtgacccttttaggtaaaatattctgtgtttactcaatataaactatgttctaaaactgacatactcaactagaactcatatgaatcctttaaatttcaagtggagtaaaatcactggtttgaatttctacagcatccatttgaccacaagtatccttctgatcaatattttggggacatgaagaagcagaatattttaaggtattgttagttcaagacagaactaagagtccctactaaagcttgaagtaatctgtctttagaagaaagactgtgactccacccaggaaattgggcataattacattaagaaggaatggcttcatccagaaagtaccactaataattttctacaataaatctccattttggcttaacagaaataaacttggtcacccactactagtatagtggcttccctttatgctactggtattgggccatatgaccaatttacaccttggataaaaatattcacttttgtatactgctttacagtttaccaaatatttttaaatattaacatgggtcttaaaagttcattatactgggccgactttggtttcgacatagacagatgttttgattgagaaatatgtgaccaacaacagaagtctgattctgcatactttcaaactgggtgaatcctactgtattaacaatgtcatgatactatctggtgttaaacaaaaaatgggatcattctctacaaagtggagagagatcattctttttctaaaaatctgcagaaaaacattacataataactcttcttgttaaataaacgagggaaagaaaaaaagtatttttagaagagaaacttttcattattttgaaaacaggttcaaaggtgttaccaaatgacttatctttttatcacatatgaataaaaagccattcttagtggagaaaaaaaaattgtttccatttaggaaaatcaagttgaggatatgtgtgtacactgaatactccatttagtgataatacttagggtaaatgggatgtgaatataagatctgaaaatttaacagaataatgatggctttgtccaggaaaggtgttgttacaccatttgatcaaaagtttttcttagttaagtctgtcaacaatttctgaactacctgaaaccattttgattatatcaatgacaacactgcagaaaaatttgtctgtaaggaaaaattaagactgttttaaaagcttctaataagaaatatttgccaagaatacatgatttttaagaagaattcttcttcatataatcacaattctgatatcctttacctaaaggggaatagggataattaaattagaacaaagctgtaagaaaatgttcataaataagaattacagaaccaaatgatcctagtgggtctggtaaacattctcatttttatttacctacgttgcatcttttaagagctcatatctgccacaaaagtaacaagttgctgttttcttattaaatgtgaataatttctcataagatctagcaggtaccaaatacaatttaatttataatgtatggggtattattaaatacttgcaaatattaagtcaaagactgacataccactaagaaaataatgcagtggtctattgatacactaacaatgatggcaaaacctaatccaagactttgggatgcaaaaaacctaacatatggatatggacttcctcagcagaaattcgagtaatgcatagtttaaaacaaactcttcatttctataataaacacaaatcaagcaatgagaatacctaacatagaattttaaattcagaaagacaagaaattaaaaaggattacttcatattttataatgatgttgtggaaaaaagaacgaaaagaggagaggtcatgtctagaatagtattcagaagcaggcctcagccaaatatttacccctgatacttgtctttaaccttagtgctctattagaactctttcagttacaaggaacaaagatccactgaagctaacacaagtaaaaatgggtcattctaataatactaacacttcatccaaagaatacaggtagcccttttgcaagtaagatctggaaggtgattaaatcactttcttttatcttcttcagggattgtgtcaagtctggcttctgtccctggtctctctcccattcccctcccaggcctggatggatctcagtctgtctgctccatcttccacactctacccaccagctccttagctcactcagaagtttttttccttcataaactcagcttgctgctacctcttccaggcaatgctacccatgacacataatacattaaagaatgtggtttagtgttactttagaaatgtttaagtaacttccatataatttcaatttgtattaaagtcttttagtatactaggtaatcgaaatgtcttcccaagagtcatacccagtggcttttaaattgtgggtcaagatttttaattttcaaggactaggtagtatcaaaaatactggaagcactggcagactccacctgataaacaggctgggttccaatggtcattgtcagagatttaaaatttagtttatcattttaaaaaattattaatacaaatggtaactagttcccacatgtcattagttaaaaaagcactgtataactactacttgctactttaatatttgctttcattctccttacttcatatgagagacaagtcagatattaatattaccatcagtattctatgctcaagagtttcaaagctataagcacctgattaaagaatgagacactgagcaccctatcattggacggccacatatcaaagatgttataaaagaaatttgagttctgagttaaaggtggtatcaaactgccccataggttacttttaacaccaagattctagtatattggtgattttacagattaggaaaccaagatttcaagttaagacacatgttattgaactagttcttttgacttcaagtccagctaatttcgatcataaaacatacattgtacattatacttgtaagaaatcctggaatctcaaattccttttaacagtacttttatttttaaaataaattataagttagaatccagttatgctgaatatgcaacatttctatgattacacccattaaagtatgcaaataagagtaaggtcaaagaagagagctacattcattttacattggatgctatgcataagaaaacagaggacctttccttttcaagtagagtagcaattgctcctaaaacaccacccaaggctcagctgaggtggtctcttaccatttgtttagaagggaatctgatctgtagctgaagcaattatgaacaggaggtaagaaaatccccatgtcttataaccatttccaacatacacacaactggggacatggatgtccacaagccaacgattgtatgcattctctgtatcgttacttacataggagatgaaaattggaaacatcaagtgagtcatgtagtgtatttttaatttataattattaaatcttcactttaaagttttttttaaaaaaaagctatctaaagccacaaacattttacctatctactgttttgttttgttttttttcagacagtctctctctgtcgccaaggctggagtgcagtggcatgatcttggctcactgcgatctctgcctcctggattcaagtgattctcctgcctcagcctcccgaggctgctacccttacagctgggattacaggccctcaccaccacgcctggataattttcttttttgtattttttttttcagtagagacggggtttcaccgtgttagccaggatggtctcgatctcctgacctcgtgatctgcccgcctcggcctcccaaagtgctgggattacaggcatgagccaccgcacccagcctcagcttcaattatgaagagtaaatgctagcaaaatgaattgatgaattttttctttttaaatattctatccaatattttgcatgtccaaaacacaaggtaaatttcacctatatttaggtgttgtagaagtccaacaaactggatttcatatatgcacaaaacaagccataatccaattattttcatgggataagtcattccctaaggggataattcccttagggataattcccctaagggaatgactcattagggaaattattcaagtaatgaatctaactcccagcaaacaagatatataaggtatgcagttctattcatttaaacattccacctttttctgagtatcacatatgtcaagacagtcattgcaaaaacatttgcaagctgcatgtggaatgtggcaaaattcctttttaaaaaaaccgatagtgtttaaatcctatcccaactctcagagacttttcttatttcataatgcccccctactcctacaactcccaaaattactctaatttattcacataactctctgctaactttaagttttttgtatcaattccctaacaaaacattccaaattgttctatcttttattcatctcatcgagttccacaccaagtcttcctccaactggagtcacaccccaatttctcactcctcagttcaactttagttttcctgactaccaattccaattgctaagaaatgagaagtatattttgagtaaactaaattacatactcaaatcactgttgagtgtatcagtgaaggtaatgctggctgctgagagaggtaaatcatgacaacttagtgctttactacaatgaaagttttgtttctggctcatgtaaggtcaaaacaatgtttcctttcaatggcagtgactgaaggacctagaatcctcccttttagaggctcttccatctccttggtttcatgactgccatcagaagggaagagagaaagaacactgaacacagatgttcatgacccaagcctagaggaggcatgcgttaattctgctcacatgtgagtggccagaactcagtcgtatggccacacctaactccaagacagctgcaaaaaacagtctagattggtgctagggcagagtaggtgtattacgcgcaaacggatttggccaatctctgctacactgaacatctcttgtatgttcttaaatacttacttaataaccttggtgttaagagagagacataagaaatgaaagcaactgtatatctaaaaatggtggccgggcgcggtgcctcacacctgtaatcccagcactctggaaggctgtggtgggcagatcacctgagatcaggaggtcaagaccagcctgaccccatctctactaaaaatacaaaattgcccggagaatggtggcacatgcctgtaatcccagcaactcgggaggctgaggcaggagaatcacttgaacccaggaggtgagggtgcagtgagccaagaccgtgccattgcactccagcctgggcaacaagaacaaaactcaaactcaaaaaaaattaaaaataaaataaaaataaaaatggttaaaaatggttaaaatggtaaatttcatgttacatatatttttgccaaaataaaaaggatcttaaaatctttttgatgagaccaaaagacatagtaaaaaaaaaaaaaaaaaaaaaagttctaaatcaaacatgagcaaatgtcaaaatataattaaaagctaagtataatataatcttcatgtgttttatcaatactacatagagttctatgatttttatcataaataggatctcagcctgacttggcctgtctgctctggtctaaaagatgtgaggagaaaaaaagagacttgttaatatcataatattatcttaaaccagtaattcgaataaagagatctcctcaaatattagtatcttaaaattataaagtagataaatattaagggttaatacaatttggagccaatcaaaatgcaataatctcttgtccttttccttttattttttacgtattcccagatggtccaactattccgaaaagctcacggtatatactcttgagaaaataagcatgtaaagcattcttttaaagtacttgccacaccatattctactggcaaatagggctaatgctggagctcagaaaacaatactccaaaatatggcacttcagcacacaaagtactttgcactggaaggtatcagaagcagcctcagaacctggatctctctcatcttctcctgccctcctgtctcttgcccctcattctcccccaaagcaagtacagacaccagaattcctcctcaccaaagcagataataaagactagatctctcttctccaaagccagccataaaaactacaattactactctaaccttcccctcacctttctgtctaggaactggcctagacagaaattctgtctagaaattctctgacctacccttgtcccaataatataggtcataagaccctcatcagaggggtcctgtcccatacctgggaggaagaaacattacaagagagaggccaagaagaatctgaacagacaggtcttggtgagtttttatatgcagtctattaatattagatcataacctttttgtccagtcctatttctacatagctgtccatttttcactgaacctaagcactgaaaaatggatagttgtcccatatgtttggggtcttcactctgaaggctcctgtgtcatgtaaaactataattaaacagatttgttatgcttttctcttattactctgtattttgttataggagtgttggccataacccttatgatggggaggaaagggatcattccctttccactactatactaccaaatataaactagtagtacccttataattcttatattttcttactattttttacataatggagagaaaaaggagttaataaccctgggaaatttactatgccaatgtaatcctacctacttttagaaggtatcaaaatatttgtagaattaaaagaatgccactgctaaaaggaaacaaatttgtgtagtattagataacactcctgttgcttccaggcaaggcacatcagaggtgagattaccctacagataacttttttaagaaaagatataagtaacctaggtattataattttctagataacttttaagtaacatagacgttataataattttcaacttttatagcagatttaaatttctacatattatataacaaaatctctaaaggagccaagcataagacattccaaataatttccaaacacattttggctatgaatacatttcagttttacagtcattaaaatttacacagcttagcaggtcacagcaggtgttacgttattctcacgaacaaaagtttaacattaagaacaattcatatattttgacacatctgctatatatattcgtgttgcaaggactagactgcgagcttaaggttttattatattatgcttacatttgaactggttatcataaaaaagaaacattatactataaaacttcagagaaaaagatatacattaaaatagcaacaacctaaatttactctataatataaagttccatcaaagcagctccatctaaatgttaacatgtctaaatattctgtgcatgcttctgagtacatgcatatgaataaaatgctaaggggaaaacaacataattgccaaaatttgttttataaaaggcatttcccccatcacataacttcaccatttctagtaatcatcacacccccagaccaaagcacgaagttaaagaaggcccttataatacacataaaaagtcaacaacttccttcagactaagaagaacaaattctaaactagagaaccctggatgagaatgacctgcccaatccccactgaaaaagatggaaaattttttcctaaatggagagaatcacataatgattcatgtcttcaataaaacatcaactaactcagaaaaagaaataccatggcaaattatacctcaaatattatattagacatgagcaatgtaaaaacaactatcaccgtaagaaccctgtctaggaagcaattaatctttctcaagaaatgcagtaagtctgggcacccattttcaaaattatcaaggccacttttcatttaaacattaacatttattattttcatttaaaatgttcaatgtgaaattgttaatatgttaatatgtgttttaatacattagtttacaagtaataataaggtctgaaaaacaatttataaaaatgactatatgctgttatgctcaaaataaatcataaacatttttcccagctcacaccaggccctttatctgagggattattacaaagcaactaaaaactcaatcacaatataacgaaaataatgttagctggcataggagagtgttttgaagtgctttctgaatacctcagtctcacactcaaatcaggagcatctgtccaccaactgtcaagataacgtctagcctaggagttttcctgaattcatcactattcatagatgcctgtcactattcagaaaaagaagaaagaaagagccatactttcaaagctattttctttttctatatgtcctagtagaggtgaatatagaatttatcactttgaagccaatgtagtctgaatcaaccggtcctccatctccagatctaagaatgcaagttaaatgttctctagaaattatagataattcactatgtcatattaatacttctcacttatattactactgattgaaggatctgatccctagactcaaagccattacctcaccattactttcacaactagaaagtacaatccagccaccaacccctatggaaaatggcacaatcaagagtaaagtgtttccactgacgccaagcactgtgattcatgcatgtaatctcagcactttgggaggccaaggtgggagggcttgaggacatcatatgagtttgagacttgggtagagatcctgtctctacaaaaaatacaaaaaaaaattagccaagcatagtggaacctgccagcagttccagctacttgggagtctgaggtggaagatcacttgagcacaggaagtggaggatacagtgagccataatgcaccagtgcactccagcctgagagacagagtaatatctgtctggggaaaaaaaggtgttttcattggcttcgttttagatgctgctgcaaaattcaagttaaagctgtctctctcaagaaacttcatttaaaatgcattcctatgaaatttatatccttattttccgagtcagaaacaacaaatttcattttataacaaacataaataatcctcaaagtattcagaaatgcttttctgagccactgtaacaatgctgtgtgatacaggagaggaaaacaagactgtcatccctgcagtcctcaaaagaaaaagttaacaccaaacaaacaagataatacaaggtaggccaaaatctagaaaaattgaggggaaaaaaaaaaaaaagaatccagaaaaaggtaaaactacccgttactgagtatgcagttgtaccattttctactttacatactaactagttcagtcagtaatatctctatttttagttccttaaacctacatacattagagaactattaggtgagcaaatcagtaatcaagaccaaaaacagagaatcaataaggaatttagttttcaaaagcatatttttttcaaatgcaaaagtaaggaattttttcctacattataagacttatggtatcttaatgtttatttatttccataataatttaagggaatgaatcttcagtttttgtgtaaatatgacttaccatggcacttaatacaaatgcatccatcttctgggatccagacccacaagttctaatttcattttctggaaaactacacttttaccaaggattaagggggttctaatacaggtggactattgccctccctttaagaaatactaatttaagagctcagtatctcctgggagaaaaaactgaattttaaactaaaatcattcttaaatcattcagatctctggccaacaaaatactttccagtttctgagggaaaaaagatgaagaaaaggcaactattgttataaaatatcctacaatatagaagaaaaatcaggtacacaagaaacaaaagtagggttgggcacagtggctcacacctataatcccagaactttgggaggctgaggtaggaggatcacttgaggccaggagtccaggaccagcctcggcaacatagcaagaccttgtctagaccaaaaaaaaaaaaaaattaaattagcctggcatgatgatgcatgcccgtagttctagctactcgggaggttagcttgagcccaggagtttgaggatgcagtgagctatgataaggccactgcattccagcctcagagacagagcgagccttgtctttaaagaaaaaaaaaaagagaaaaagaaatgaaactgcaataagggcagtaagaaaagttctggaaagtgttgacagtttcagaaggaagagtttactttcaaatggtgacaagggaagacaagatacaagaggtgaaacttgagctataacttgaagggttgatgagtaggacttcaccagtgactagagtgagtgaagtattccatgggggcactgtgctatctgcaaagatgcaggaaaaaaaattataacaccactctccaggaatatgtgaccaatctagcagaataacagaacagaactcagccttttttgtgtctctacttcagagacaagaataatatactccagcagtaacactgctcactgcatacggagatttgcaagggttaagggtcgggggcataaccacagaaataaggtccttgtgacaactaaataagataaaatattatatttaagatcattacattccttttgaaggtcactttgactacttcaatatacagttcaaatatatttaattcttccaaaataccattgccaaaaaaaattagtgaaaagtggtaactggcttatataatttcgacgatttaatgaaaacaatacatatgccacatatacatggctaaaagatgtcacagttgattcaaaatggataagcaatatatatgttgttacaattttcaaagtaatagctaaaaagtacacacagaaaggtgtttatacacattcactcatctatctggcacttcgtagaagactaggaaagctactggcctttttaaaaggttagttctcataaaggcctagtgcaggcagctctggaatttcatgcctccaacattaatgtctggaatttcatacctccaacattaatgtctagtatgctggtgggtgctactcatcttttcaaatctgttttaattattctgttgctgggcattttaacagatcttaagtttgataaatttagaattccaactggaggttaacccacgccccaatatgtaagccaaatccatttcaattatttacgaaaggcagataatatcagaacaagactgattatttaggtattaaaggatgtataagtaaattccagtggtgaaatctggaaaaattatctggatgaagagtcaggtgttttttaacgtgtgggaaaaagttgtggggttaatattatttgatctgcttactaaatataaaaatattttacacctataaagtgaactcaattaatgcagggaacaatctaaaatatggcaaatatttaatatggttgtttggtaatatttaagttcagtttctataacttacaacaggtaaattctcaaaagaagttgtcaattttctgaaaatctcagtctgtggttgctcaacttagcaaccaatattctctttttcaacccaaaagaaagttaacatttatctatgaacaagcactcagtcccacagccatgagagttgtcaaaataacaggaagaaaaatggaccaaggatatataaagctgaaaatgggtcagaatgctcaaattaagaatcaaacttatgtttttatttttcttgctttttcttgcaagccagggcatcctcatgaaaaaacaggtaagaatttggcaagaatagggatagaaagcaaaaagaaacttgttttcccaaacatctggcatccttcaacaaactctggcaatgaaaagtcaaagcaaagcagataagattctgccaatcaccttctacttaggcagtggcaataggtggcctagccaaggctccctgcctgagctgagaagagatgtcagtattgtggtaaagcccacctccttggtcttcaacagattccttccatacccccaggttatgacagaaaatgagcaattcacacaagcataaatgtgaaacattaacatttaaaaggagcctaacctacataataagtgctgaggctgaatacacattgtgggtcaaaatcaggacaaggcagctcaacatggcatctgttaagggaagaaaaataaagggcagacaaaagacaacatttaatcctaggttcaaccttcataaatcagcatacaataccaaaagtaagttagttgattgattgattgattgattgagacagggtcttgctctgttgcccaggctggagtgcgatggtacaatctcagctcaacacagccttgacctcctgactcaagcaatcctcccaagtagctgggacttcaggcatgcactaccatgcgtggctaattttgttcactttttgtggagatagggtcttgctatgttgcccaggaaggtctagaactcttggcctcaaatgatcctcccacctcagcctcccaaattgccaggattacaggtgtcagccactgctcccagccccaaaagtttattattataaggactcttactcttcattgtaatttataggctgaaattgcaaaactgaaaaccctattcttgcaacaataacttgaggtatttagaactcatgacaccaagtttcacatcctctttcttaagtctgcagaaaaggaacctccatccttatagttcaaagtctttctagcaaagaaaaaaagagaaccaagaaaaaaaagcatcataactattttgtaagtatcaaactaaaaaatttgatataatcttagtttaaaaaaataattataacactgatttgatatttaggcatagagggatgttggtgttttataagaattgacctgactataagcagcactcagctacatctctcaaaaataagggaaagccattttaagagcttgaagtagtatgttgtagtcctatgacattaatagtttaacagaaaccacatacaacttgaagactaaaactatcaactccctaaacaactcacagtgtacgttaacatgacttgactattcagggagagcctcaccctggcaaacggtttgattgttcatcacagcaaactcctgaaacacgcatcaacgattcaatagaaagccccaacagtatgtaagattttttgaatcccttgctgttgcataatggtcatcatccaattttaatcaaacacacacacacacccagtattcactcaacctcaaccaaactttgattctcagtacatactatccttgctttcttccctccaagaaaccgccaaagttctaaccaggtggtgtactccctttctgtgacaggcaataaactctatctataggttgtgagggagacacttgggcagccagcacttgatactatgccagctgtaagttttaatcattcaggaatatagtgcaaagagtactgtgaacttatggtgtgctaatgcatcatactagcaattgtgaatttagatcataaacctttgtatttcacctaaaactttatgggaacagataggacaggacaggcaatcccaatgcttttgtagaaaaactgtctggtcatatgctgtcagttcttcacgatttcaaagaataaccacttgaaagaaaattttcaaaaatctaaagacttaataaaactaagatcaatgagttttaaagtacgtgtcattaaaagcacaaactcatttgcagtctatggactctaaggcaagagtcatatgccagacatcccagaagaggtaaaaagttattagagacaaaaaggacttcagggaaacttagtttttccttagggaaaggagtcctccatggagtcacatggccctccaataagtaggcatcaggtagtgtatcaagaactgatacaagatcagaaaggaagagccaatgagttaggagaaaccaaggttgggtttcaagaattgagttgctacttgtgctgaatgatattaagagatggagaaaaagaaagagaaaaatgttcacgcggatgtcaatgatttttactagactcttcagaggagtaagaaatccaaataaactagagtttagggcagaaaattaactacaaggtgagaatatgaaagatgccagtgtggacaaaccatgcaataaaattttattaaaagagaagcagaaatagaggcagtagcagaatgggaagcaatatgtcaagagggggcttttctttttaggatggaagatactattgcacctttatatgccggtgtgaatgataaagcagagagggagagactggtaatacaagagaggtaatgatttgagattttgaaaagattaaaagggtggaattcaaaatactagtgaaaataagagcatatgcactgagtttaaagcatgagaatatggtgagaacataaatgggtacagcctttccaggaaaaaaatcaagtacctcatagattataaagagacatgaaagtaaccatatcctttgagccagtaatttcactcataaaaatctaccttaaaaaaagatctgaaatctatcttaactgtctaatgatcagggagaactgttaggtaaataattataaaatgctattaaaagtccttaatgatatgggaaaacgttcataatattaagagaaaaaaagcaagatataaaattccaaatgttgtattttaaaaataaaaatatgtgcatagacaaaagattaaggagacataaaatattagtaatatctctggacaataaatgatagattacagtgttcttctttatgtatatttttcattttccctaataagaatgggtcactttattaccagaataatttactttcatcttgcctgtattttccaagtctctctactgacaccttcctaacagctttaaatatttgtgtatttcagaaataaaattgtgatagtggcaggaggcagacaaattcctaggcagattgggacaggtccccagtgaaacccaaccttcagggcacacacagcatgaagcctgaaaacctggctgctccttctagctggaatccacaacctggagggagaatttcctttacgcctttcagccaatgaaatggtgttttttccaggtccacccatggaccactcagcacgcacttcctcctgcccagggaccaatcagcacacacttcctccattttgagcccataaaaaccccagcttcagctggactcaaggtaagtaaggactacccttaggagctgcccgctttgggtctcctctctgctgagctgttctgctactcagtaaaacttctccaccttgctcaccttccagttgtccacgtaacctcattcttcctggacaaaggaccagaattcgggacccacccaacagtgggcatgaaaagggctgcaacactttcctggccaactcaccaaactgtggtggtgacatgctcccatttgctggactgcaggagtgaaaagcagtgacacttctgggggccgagacatcaggatttcccaagccagggctgtaacactatagccttcctgccttctgcctgcattgggcagctgccccatgtgacaggaagtggcagtggagctgggccagcctgggagccgccggctggggtgaggtggtgggactgaacaagctgaaacctgctccccctgctcgccgagccgcgggtggagagaatgagagagcacgcctgacccactccttgaggctctgcagttgctggcgtccccaagtttttaggtgccaccgcatcccccttttccagacaccagcacctgcaccagaaactacgtgtggtacgcctgctccagctgcagcctggcaaggagccggcacctctgccagcacccagagctgcctgccccaccacagctggccggaccctgtgttagctctctcacacacccttcagtgctctgagcctggtttgccctcatcaggcgtgggatccgggttgggcgaactgagtgcagcctgccgggctgagtgggtggaacgagcacagtgggagtgagtgaaactcaagcaggggcgccacaggccacaatggttcccggctggcagagtgacacctgaaggatcccgtgacatttcgattatttctgctcatagcataaactcttatatgtaagtatctaccacatgccaaaatgaaagcaaaaaatatatataatagcctgctgtagatatatattatgttgttgtagcagctcatgttttctaccatccatacgtttaagataaatggcatgcaatatcaccaataataaggcaatagagaacaaagagtctgcaagaatttagaaaacacttgctttgatatacagcaagaactaaggggcaagaagaggtaatgggcaagctctgagtcactcttactggatggtctcagtacagcaacagtaactaggataagccaaggcgtcctctacacacatagtgaggccagcttgaaacaaggaagtacatagttgcagacttggaagctagccaccgcagctatttaaaaatcaatagagagattattttttaaaccctctttatccaaaaagagtgttctgtgaagagaaatagaaggcactagaagtgacgcactgaaagatctcagttcatggaatgatcacatttgtaaactaatagtttgtgcctctttttagagtcaaaagtcagtaagctcaagtcagtaagctctgggttggaattccagctcctgtttattagctgtgcaaccatggaccaatgtacttcactaaccctcagaatcttcatttataatttcaggattatgatattgtacttatagagctttgaagaggataaaatgaaataaaatgggaaaacactcagtgaaatgcctcatatgtaattaccatgtaacggtttttcctttcttcctaatttcatttaccaccttcacaatttgtgtcatattcacatgccatctacattatttacttaatattgttcctcatatagatttacatattttttctaaataaatttcgcctcatcttaacaacactacccactgagaggctgaatataaaatggacaacagtgagatcatgtataaccacagaactctgagccacaacctttgcaaccaacgcaggatggcaaaccacaagctctgcagccaagagcccagaacggtcaggacttgggcaatgacaaccaaggaccaaacagaaaaagctaagatgttccccagaccagtcacacaagatacccacacttccagctttcccatgccaacagccttccaaccacagcatacctaaagctgcctctttcttccattaaaaagcttctccactcccttgctgagcctaccaaagggaagagatggtggctgactggacgtttctcaatctttggaattactaaatacagcaaatgtgtttttaaataataccctcagactctaggtagtctagaaatttacaacactgcttcttagtgatgacggagttgttatataacacactggttcatttaaaagaacaggaaaagagtttgtgtactgataataaaaatttaactcatgttgagaaaaataagtaataaataccaatgaacaaacaaccagcactctcaaggactatatggtgacacatctattgttatgtgcatttgccaatcagtattgttatggttctacaaagaatccagtgcaccagactgcagctaattatgtatattcaagtgattagcaagcacttgttgcctctttcacaccaccctccaaacagcagcctttgagaggagaatagactgcaaatttattgagagaacactgttaatcctttggggagaatgtaaatgtaaacaggactactctacatcaaggtgctttgacaacaacaatcatctgcataaacacatgctcaacaacaaacaggtgttctatttcacaactagcacccatttgatgctttcaagtaagcattatgcacaaactgttagaagtactttgaaaccagctgcaattactataattagctgctttcctatactttgtttccttttacctgttcagtactgtgctatgccaattcatacactccaagtaaaatgaccagttcaggacttttactggtaaggtatgaaaagcacacaaactagactccatttaaactaagtcaactggaactttctccaaatatcaaaaatactaaaggcaaaattcaaatacttctattttaaaattacattaatgagacaaaagatagctctctttcaaagctgtttaaagttttgactcataagagacctcaattattgtagtattaactgactagaagaggaaaaggggaaatattctaaaagtctatcaattaaagaataaataaaaagtagtgctacatattcaaatggaatactatacagcagctaaaaggcataacctaccaatagctttagctacagctgtaactacattgcacacggacagagcacaaaaacaatattaagtgaaaaaaggaaaatttcagaatgccaataagtataagctaacaatcataaacatatgtagtgaccaaatcaaaatctatatacaagttatatctcagagaccttttgggttcagttacagacctctacaataaatatggcaataaaacaagttatatgaaattctggtttcccagctcatataaaagttatatttacactacactatagtctattaaatgtgcaatagcattatgtcttttaaaaagtacgtatcttaattaaaaacattattgctaaaaatgctaatcaagtgagcatatgctgttggaaaaaatgacacagatagacttgctcaacagagttgccacaaaccttcaatttgtacaaaatgcaatatgtgcaaagtgcaattaaacaaagcacaataaactgaggtacaactgtaaccattagcctaattctaaaaccaaaattttcaaatgtattaatataaatctcagaaaatccaaaagtcaaatatggcatgaactctcaacagaaaaaaattagctaattctcttaaatccaatccaatgataaacacactgtcaagtccatgagggctgtgactatttcagcactgtgtactgctgtatctcctgtacctcactggcacttccagtaagtaatatttcatcaataaagtatttatgaaggagtgaatcaatgtatgtatgaatgtgtaaatgagtgcacaaatcaaagttcacaaataaactgaaacactgaagtattgtttaaaaatatacagtgtgaactataaaaaggaaaaagaataccaggtcacattactccattacagtcatgcattgcttaatgatggggatacattctgagaaatgcatcattaggcaatttcctcactgagtgaacatcatagaaacacctagtttttaggctacaaatctgaacatgttactgtactgaatacgcagttctaacacaatggtatctgtgtatctagacaaatctaaacatagagaaggtacagtaaaaatacagtacacagggtaaaaaaaaaagtggcacacctctatagggcacttaccacgaatggggcttgtaggactagaagtgactctgggtgaatcactggtgagtgaatatgaaggtctagtatattactgtagactactgtggacttcataaacaccgtacacttaggctacaataacaaaatatttttctttcttcaataataaattcagcttactataacttttttacttcataaactgtttaattttgtagctttttgactcttgcagtaacacagcttaaagcacaaatacactgtacagctgtacaaaagtattttctttatatccttattccataagcttttttctacttaaattttttttaccttttttgttaaaaacttagatataaacatacatattagcctagacctacacggggtcaggatcatcaatatcattgtcctcctccacatcttgtcccagtggagggcttttgggggcaataatgtgcatggggctgccatctccaataacaacgccttcttctgtaacacctcctgaaggacctgcatgagactgttttacagttaacctttaaaaaagaaaataaagcagagagagtacactctgaaatgacaacagtataataaatacataaaccagtaacacggtcatttattatcattatcaagtactatgtactgtatataattgtatgtgctacacttttgtacaaaactggcaatgcaataggttggtttacaccaccatcaccataaaaacgtaatgcattgtgctatgatgttacatcactaggcaataagaattttttagttccattataatcttatgggatcgctgtcatatatgcagtccatcattgactgaaacatcattctgcaccacatgactatttttcaacatgtttctaaaaatatcatctaagtatgatatttgaaactttaactggctactcataccaaaagcaatttgtaacattactttatacccagaaaaatatttcgttgcgtttcctctcataacattttccaccatttttattagagactactgtaacatacctagcaacaaacgttagcatgagtagccagctcttactatcagtcatcaccagtcattctcatagttgatatgagttgtccaactatttccatctttttattagatagctgcaaaagtgggtgcatgctcaccacaatcacctgtgggaaacaaatgtaaacccaactgatgggtcaaactgtagaggagagaagccaatgacaggtatttgagacaatgccatggaagaataaatagaatgggagaatgaatttgaagttcaaagtatgtatttcaaatattattaaaaagtaaaattattcttccttgtgctagtgctaaacacaaaatacatcctaaataaatattaagtacagtggtaagtaatttagggggagatgcatttagctttggttatatttagcctaaaccatctgccacatactttttttaatctgtaaaaataagaaaatgcaagtgctagacagaaagcttgagatgggggtaaaaagtatatgctttgtagtcaaatacatggattcaaatcctggctctgccacttattatcagtgtaacctggataacaatccctctgaaactcccatttcactagaaaactggatgataataatttggtaacacctaccacagaaagttgttctaaagcttaggttattttatataaaccaattagcatagtgcctggcacataccatagtgagtaatcaatgttagaaattacaattaccaatcattgtcttagtgataaatcaacattcagattccaaaaacctggggtcaagaaaaacataaaaggccttaaatggctgtacttgatgcccactgttaatggaatttactagaaagaaaggaactaaagaaggctgaaggaatcatagtcctggaagaaaatgagaagcaagaattagaaaaaagaatggccctaccaataaaggtttaaaagtcagaaaaataacagctatagaggtattttgttcttaaagctatttcaaaggcaaaccaaaacaagaatgaagtgaatggtattatacagcaatcttaaagaaattaggagccttgcaagtactaagttcgaagataaagaaatggaagcctaacaaaatgagaaagtcaaggcatatgctgatttgaaacaaaacagacgtactaagactttgcttaagattcatctactttaaaacacctcaaagtccacgtaacttcatccagatgtatgccacccctatattgctattttctttccaccttcccaacagataacagccatgcaactggcatttcatagacacaagtatttgctgaataaatgaaccgtcacacacaaataacatatgtaaattatctgaacatagagcaatctttccagcatcatttctcactagtccctttctcacagaatccctcaaaccctactaatctactttcacttccagaaaggtgcaagagtcctttctgtcacacttttgctggtccctcttcccataacctgcttccattcacagtgtaccaggcaactcttactctaccttcggatctcagcttcaagctcaaaacttctagaaagcctttcttggctctatcatacacaaaatgtgagtttggacaagtcactttatttctctgtgcctcatactcatctgcaaaatgggggtgatagcgctttcctcataaggttgctatgagaattaaatgagattaattcaggtaaaacacctaaaatagtgcttggcgtgtagtaacagctcagtaaggcatgggtgtaattgttattccctgactcctaaatccaggttaggagccccttctgttattccttcttcttcttcttactagtattccctttccctaccacagcatttatcaaagtgtgggttctacaatgttttgctaagaaagatgaaaagtagaaagaaaagaactaatgaagaagtagaaagcaaaagaaaaagtgagcactcaatacagggatgaacaaacaaaagaaagtgaaaaggagaaaagggacagggtagacttccttaagatattagtaaaataaagcaattcttgttttaaggatttcagtagctttcctcttgagccaaaaattctacaataaataggacaactatgagaatccacagggagaagtcattggatggcaatgattagaacaatattttgttataaatcagatgaaataaaatcaggagcaaaaaggatttcccatctaatctagaataaaaatcacatataaaattgatctagactaaagtaggatgcacttgtaaattatgaaaagattccaaaacattgaagtactgtggtctcttcctacaaattaactgttcattttaaagtaatataggatggcattatgactgaagataactaatatactcaaattgcaccgactacatccctggcccagagaagttaaaacagaagaaagcaacaatgactagactcttcaccaaaaaagaaatgtttgtttttgcaggttagctccaccatttttttcacatttgcatcctaatagttctacttggtctctccattatgcaacagttctttacaatacagccagctaccctgacaactgggttcctttgccagggtggctttgtctaaatcctaaagctgtgcttggctttgcactgagcccagtggctgcctgtgatctgaatgccaatgaagactacagaccctgttgtctaacaagccagagactaaaaggtctctttggggtcaacaaactgtctcgactactttcataagcttaagagactggaaaatgaagctagaaatgcatcttatttcttaggaggacaatgggggaaagtattaaacgtttaacattcatcagatactgttagggcttcaactttagggaggtgtctagtaaaccttcacatgtaaataaagtacttgttcttttaagaaggaataagcttcatcttaaagaaaatgtaaataaattttatattatcaaatttgaaaatgtttagagaatttatgtgctcaaaagtatacataaatgtctccagtcccacttcccacttagtactcgttgaggatgaacagataatgacacggaaataaagatggtaaaccattacacactgtaaaatttagtgttcagttacaatctaagaaatgcaaaactatgtaactctaaagaagcaattaggtagtatatactaaaaagcaaacattaaaaatgctaaaatccaatggtagaagaatattgttttaactacattattttagtttgtcaataaaaaataacatgcattgtttttgcttgtttacatgtctgaatctgccattccgctaccatacattttcttgtatttttgtgcttggaggctcccttttccttctttataacgaattcaccatctctcatttaatcaaatggcaaatcctatgttttatttcctagatcactctcaaaccttatgcttttgccacaaccctagcacagatcatggtgatctctcatctagattcctatgagagcctctgaactggaatctggccggagtagtccaataagacacataatgtgacacatacatgtaattttaaattttctaaaagccatacataaaagagcaaaaagaaagagtaaaatttaactgaataatatatttaaccaagtatatccaaaatatgatcatttcaacatataaccatagaaaaaattgagatattttacattcttgttttttatatcttgaactcaaaatccagtgtgaattttacacctataatataggtcaattcgcactctaaattttcaataacttatgtgaaatgtagtccaatcaaaatactaaagttaaaggaaaacatattgtttaaaattttaagttaaatttttaaatcaaaattaacaaaaatgtaaaactcactcctcatcacactagttacctttcaagtgctcaacagccactttggcccatggctactttgttgaacagtacaaatgtaggtcttcaatttttgcctcttctaacctagactgaacatattcaaaaacagagatcattcacatcatcttatggctttaaagcccctcaaccacgtcctgctgatctgacaaaacccaagtgcttacacaggttttgcaacctaggctccctcctccttttccagcctcagctatctatctccattttccccttacactctgttccccagataaacaatgctttccccaaatcccggaacatgctgaactttgtcccctttggcatgtgctgctagtccctcaggtttcaaattagaaatcactttttctttttagagccctttctgttacacagcacaagctcttgtgagggtaagaactggatcactattgctcattattgtatccccagcatttatcaaaatgcctcatattttgtaggcactcaaaaaatatgaatcaatccacagagtaatcttagctgcccaaaataggccaaaggcatgtcctcatgtcaacacatgtggccggaagagaagggtcttcctgggagctcattacatggttttactatcactaaccaaaaaatgagagaaactacgccaaaattagcaccaaaacacttagactctcaagtttggaaaatgcagtacaaagtaatactttgtgttttataggttcttttgagtccactggaaaggcagtatacctgagtaacagagtaaattctagtgtcaagggacttgtgagaaaagcgtttgccccccttcttacaaggagagctcattagtattatttcaggtttctttctctccctttactccctctaattctggtaagatggagtattttaatctggtgaaaaactggtgaggaaaaatccttggtatgcaggattctgctgggccccttttcttcctgttgaaactagtaggctgcagaaaatgcaaatgtgtctttttcctctatgcaagagatcagcaaactacaaaaggctgatgcctatttttctaaataaagttttattggaacactcattagcttacctgttgtctatggctgttttcttgcatcacaatcacagagtagctacaattgcaacaaaaaccataaagatccctgctctatggcactgtcttatttatattacctgaagagtgcttgaaaaagttggcctggttctgcaattcaatcagcaggtcatttggctctcaaactcagacctccacttggacttttatcattagtaggtacgttctggcctctatctttactcttcattttgtatctggtattgtacaaaggccaggtaggaaagaatgacttatgccatgacctctagaaaccccaatccttcatctacataaaatttccaggcatgtttattaagttctagggtataaaatttcaggggaggggtctcatcaaatatttgttcaagctatgaaatacctggaaatctgatttttgaagaagtgttagccctacatctgggaaatttatatcattaatgttaacttcatcacatatataactgtatgttccatatatcgtcaataaagaacactaacagtataaactccagcctagttcttcaaagacttttagtattttcatgataggacctttgtttcatgcaagcacgtacctgtattctgggcagaaattttgttagtctttgttgatttttgtttccttgtttctctgtttctctctcaaaacaaatccacattacccaaaaagtgacactgaatcacccatttccagtaacactaataaataattattccaatactttattaagaagcattcacctttttctcatgccaatgtttttaaaaatagaacttttttacagtgaccattctatcatacatatttgtaaaaatatacatgtaagaatattaatcttggcaataactataaggagttaaagagagggaatcaagatttcccttgtaagtttataagacatagtccaacaataatcttatataagctattttaattaggtcaatgagagtgttgcatattttcataacatgctttttattcatttcaatttcttaaccagctttgttccatttaagatcatttccttgcgctaaacatctcacatttccaaatttcctataataaaaagttgcttaagtaatttaatagaacaagactagcagacatgataaaacataaaatacttcctaccttggtacaaactcaggcttacttttggttgctgggaattctaaaatgaaaccaagaaacagcttttccaaaaaattacttttgtgcaaagaattagaaattaaacatgaaaaggactttatttttctcaatatttttattccaattagactatgagtaatctgtgtattaacagtattcaaaaaaatacctgtaaactacagtatttttccataatcctcagtttgtgataggccattctgaacccatgagtttctcatccacagattcaaacaactacagatagaaaattaaaaaaaaaaaaaaaaaacagtaaaaaataacaatagaacaatatatgcaaatgttacaccattgtatataagggacttgagcatccttggaatttggtatccacaagggacctagaaccaatcccctgtggataccaaggggccactatgtctgtgtcatatgcctctctgatagttaccacctttctaaattgaaaatttttttaaaaaagcaaaactagttaaaatcattttaatgttataaaaagaatcggattttatgtaaataataaatatactcagaggtcaggcatggtggttcacacctgtaatcccagcactttgggaagctgaggcaggcgatcacctaaggtcaggagttcaagaccagcctggccaatatggcgaaaccccgtcgctactaaaaatacaaaaattagccgggcatggtgctgggtgtctgtaattccagctacttgggaggctgaggcaggataatcacttgaacccaggaggtggaggttgcagtgagtcgagacggcaccactgcactccagcctgggcgacagagcgagactccatctcaataaataaataaaactctgataatcagaaaccttaaacatttctttttgtgaaagttttcttctcatttggtagaatgataaaacaaacgtttgtcctttttcattttcccatcataaaccgatttctcctcataagaatattctccaaaccctagtcttttttaaaagcagcactctcctcacaaaaaattatgggcataaaaatacttcaggggctccagggtatctttttttttttttaatgtgtagaccatttacgaaaatgaaactctgttaggttacttaacattgactgcaacaacaaacactagcttattacataaactttagaacatgtacatgttcaccactgcaacagaagaggtcagaaggaggtagctcttaactgactcaggccaaagtgacacatactattttcactcccaattcactggccagaaattagtcacatagatccaaaggaagtgcacggaaggctcgaaaatgtaggagcacatagaaaagttggtctccatctcaaaaacagctctaaaatactgctcaagaatcttccaaactctgtgttcaatgataaggttgtaattggccggtaaacctaaaattaggcagatcaacttttaattataccctctacaatgcctaataattttaccctggaagaaaaactttgtatataagggacttgaccatcctggcaaagaaatttcctggagaagacttccctggaaggaaaaaccactgtttgtttaaaacacttcattttttctagtcttgttttcaaaaatactatgaataaatagtcttaataacactcagaaggtagcatttgaaatcaattccatggtttgaaatacatagttttattaaggaaaaaaatattttcaaagaatttcacaacttatcaaatacagagatagactgaatgattatgccaaatgttttagaaaataactaatttacaacagcccttcttaacataggaaagtttaatattttaaaatgcaagtgtcataaaatttttttagtactccaaatgaatagtaaatatatgaaaaagagttctacttcattagttatcaggggaatacaaattaaaaccacattactggccaaggttgatgctacacctgtcatgcctgtaatcccagcactttggaaggattgcttacacccaggagtttaagaccagcctcagcaaccataggaagaggcccatctctaccaacaatatcaccaagtgttggtgaagatatagaacaaatgaaacttacaaactgctgctggaatataaagaataaacacttaaggaaagcatctagcagcatctacaaaagttgaacatatgcacgttctatgatccagcagccccacttctaggtacatagccaacagaaatgtgtatgtatgcacacccaaagacatacagccaaaatgtaaaaacaaaacaaatccaaaaatagaacagataaactagggtctagtcatgcagtggaaatataatacagcaatgggcctgaatgaactgttagtacaaacaacaacatcaataaatctcacaaataaaattttgaaaaagccgccatatgatttcatactcaaaagcaggcaaaactaatatatgctgtagaagtcatcctgtttgcttggtgggacatagtgactgtaagggtagaggaagggaaggcttataaggtagtggtaatattgttttttaaatataggtgttacatggtgtgcttacttcatgaatatttacagagccgtattcttatgattctttcacttttatgtatctcatactttaagaaaaagtttaccttaaaaaattattggccgggcgcggtggctcacgcctgtaatcccagcactttgggaggccgaggcgggtggatcacgaggtcaggagatcgagaccatcccggctaaaacggtgaaaccccgtctctactaaaaatacaaaaaattagccgggcgtagtggcgggcgcctgtagtcccagctacttgggaggctgaggcaggagaatggcgtgaacccgggaggcggagcttgcagtgagccgagatcgcgcccctgcactccagcctgggtgacagagcgagactccgtctcaaaaaaaaaaaaaaaaaaaaaattattatacataacagaaatagactctcttgattgatcacattttacaccaccaactattagttccagtattctttactatgttcagtggtaatttctgaaatggctattctcatcaccatgaggggatctcatttgtgatcactgtattcatgagtccttggctcattaaaaaaaaaaaattgttttaatttctcaaaaagatgttcttttacaagtaatgggggagattttaaattttcctgttatgatcttactgaagctctcagttctaaaataaaagtaggctgggggcagtggctcaggcctgtaatcctagcaggatttttttggggtggggaggctgaggcaagaggatcacttgagcccaggagttcaagaccagcctgggcaatatggtaagcccgtcctctacggaaaatttaaaaattagcccggcgtggtggtgtgcacctgtacagtcccagctactcaagaggctgaggtggaaggattacttgagcccaggaggttgaggttgcagtgagctatgatcatgccactgcactccagcctgggcaacagagggagatcctgtctcaaaaataaaataagagtattgggcatatcaatttttaagaaaacgagatatgatgtcaaaattatttattttaaaatgatcagagcatactaaaaacatgtatggatttagagatgattttggtcaatcctccttattttacaaaaacaggaaaagtgatttgcccagggtcacaaaagtatgtggtaatagatgatattagtcagtactcagctctctggaatgagaatttgtccctattccctttaaaccaagcttgtccaacctgtgaccctcaggccacatgcagcccagaacagctttgaatgcgcctcaacacaattcacgagcttaaaacattataggatttattttgatttttttttagctcatcgtgtggcccaagacaattcctcttccaatgtgtcccagggaagtcaaaagactggacacccctgctaaaccattctgctgctcattttatcactggcactaggaatggaggttttattatgcaaaggaatttccgatacatgcctttgaagttggatttaattaattcaagacacataattatataaagtgagcatctgcagtacccgtagtattcatcctgaaaatagtttccaaaactcaatgcattcagaacttcaaaaaaattaatgtagcaaaatctgcattaactctaaaattcagctttaatgcaggtatcaaaaacttcaaaaaaacaaattccctatgtggaatcaaaaagatctttcaggttcattcgatgattttttactttgctttgtttctgtttccatttagccctattttaatgcttattttactaaactcaaacatagggagtactttattttctaacatgtttgtctccgtatgtttttttcaataatttaacgtccatttctaacttgcctatcagtcccaggtctttttagatctttctcaattatggttgttattttcataatatctaaatcatatcatatgtaattgttctattaaaatgtattctgtctttacatttcaatgagctaaacatgctttatcttgagtgataaatgttttttcccctaaataataccaacataagcctatacttgatacagccagttaaagttagaacaaaaactttagagaaaatttctggtcaattagtgtgtcactgagttaatgaatcatttaattaccacttgcttgggttatttgtcccctcactttatcaataaagaacacagtatgacataagaaacttccaagtttgaactaagtcacagccaggacctctgatttctaatgtacctgaaactaacatactctacagaaaagatgaggggtctcataacctctgcatattcaatgctttcatattcaattgtttgtttttaaagaaattagtttattagagacagagagagaacgaatctttcccttgataatctccactaaactttataaatatgcttagaatggaaatgaatgagaagaaacagaggatgaaggagacatcagaaattttcagccctgtgttttacctctggagaattcttattgtcatgaagaacatgaacatggggggtggggggcagtacaggaaaggaacaactgcaagctgccatgctgagtttaacaacaatcatcaaaaggggctttgggagctcaccagctgcaaagtttttgtattaggctgtgattccattgggaggatgggagcccctaaataatgatgtcaaaggggtttttacatgcccaggaagctatttcaagcaaacaaaaatctacatttattcctaatggaggttaaggcctttggggattagagatagagagtgtagatggctattatctaaataaacttactgttcctagcacaacaaaggaatatattcctaaaaagaaatataggatattattttcaccgtaaaactgcaaagaaatgaacactttttccaagaacaaacaaaaatgtcagaagtttcattttgaaagttatacggcaaagtgaatttgagaattaaaagggaattagaggataatttcaagaggaatttcattaacggagatttctgcatcatattttcatgctttttttattatagagtgtaattcttaatgactgcttcaacaaaatttggggaaagtaaaattacattgccattgctgctaagttgtaactgaccttctctcttgtacttgtattctacccagtacagcccagtaaatgcagcatgttcacgttcacttgtccaaagcaaaatgacttctttcccaagacacaatgaagagattaaagggagatatcttcaatgaacagaccaaaatgtcacctaacaacatgcttagtaaataggtacctttgcaaatgaaactcttagtatcacattgggaattaccatagaaaaccacattaaacttattgtaaactgactttatccataaacacaaaaaaaatcaaaagggataaatgtaagacagttcacttaagacatagtataggtttcttgcaaacatggctaaaaattacttaacaccataatgaataacaaggatcggtaagagtcagtaatgaaacgatgtctgaagcaagcactgaaatatacctaggcatagcacatgcaaaaaatgtgatgctatgctttttcaaccataatgacctgtaaattgttttatactaaggcccaacggttctagcaatgctgtataatctcacatctttcccctgtcaaatgaagaaaaaattaaaagatacacaaacataaatatatcttttaaaacatatagcatgcctgggtattgtttatatgattcagtggaaatcaacatggtttgctggtgtgtctggttttttgtgttttaatatttatattgcatagctatccaaaattgttcagagttttgaaagaaccaagttgtaaaaaattgtggataggcaggaattctgacaagctttctaaacatgaccctttatttcaacatgaagataaagaggcaaagctatactgattgaacagaaaacaagaatgggacttaaaaaaaaaaacaagagttggatagacagtgttcttccttctagttgataggaaggccacacagtgtaaaactatactcacaactttggtgttcacatgcacaatcttcaccacttagaaagaagcagctttattagtgcttataaaaattcattagtccctataaaaccagaaccaattcagcagataagtaaataaaacaatataaagaaaataaattcacaaactttaatgtagaatttcagaaaatgttaaagttcactgagaaatactatttagtgtgattaagataataaaaataaatcaataatgcaaacacagtattaataacttgaagttttcaaatttgagaggttttgttctcatgagaatattctctcaaaagtagtttagttatatgaataagatttctggataataattgatctgcataggctattaaaaattgcctgtttatacaggtctgactttcaaagccccaatcttgagtacgtgtcaaggttagccttaccatacgaatcagagtgacatctagtggcaactccattgaagtactacttggtacttcatctgttgtaaatacaaatgaacagtacctagcatatggcaggccctcacacactgttgcatgaatactttaatattttaagctaatattataatttcctcagttctactgaacttcctccttccttttccttaccacttctagtccttcattctctccctattttctcagttgaaaagttcccttctacttgtctcattctatggaatccctgatcattctatatttttctaatccactttttctttcattatacacatcttatcagtctccatcctaggtatatgatataatccattttatgtggaactcttctgagtactgctatactaaatcacgaaactaaaccaaataaatctatcataattcatgcaaacctgggaaattatttcattcatctctagttgacttgatcatgattgttttctaaaggaatcatgccacatcttctttatccctcttcaaacccctctcccccaaccccatctttctcattttataatatccctacttcctagaaagcagggaaaccattaaacgtgaataacttcaacttcccagctctctacttcaaacattcagaataccccctttacttataacaaaggaagtcatatacattctagttttcaagaactaacccctctttcttgtgtcccatctttactgtcatctaagatttgattatgtcaaatgatgaatctctctcttggatctttctgaatttccctctgtattttgactccattccttcaacctatgaatatgctcaaaacatcccatccaaaaatcatctttctttggcttgctgtaatctattttctttccttttatcaaaaaataactcagaagaaaaatctatgattactgtctccatttcttcagtatccattcactcttcaactcctgccaatttgctatttaccatcactactactgatctccacaaagtcaccaatgaggttatcagtggcctctttacaggccttgttgtccttgaatcctgaaataatgctgtaataattgctcttgcttggcatctaaagtgaagtgatctttttattctcttccaatctccctcataactccttctctgctttcttctccttctcatataggctaaatgcaatatggcctcatatatacttgagcaaataaagaggcgaagtcatgcttttataaagaaagtgcttcagtttctaaatagaaattgatttgcctatgaatttagctcaaaattatgtactgcttaataccctcctttccttcaaagtaatgctttaaccctacttggttaaatttgccccaattatttcaaatcataattcactgtccctaataaaccaaattttatcttgcattaacatacattttgtatcatctttagatgtgtcctaaggttttaaaaattctctattatgttaacttgcaactactgtatgcctccttctcccaccttctctcccctctcacatgcatgcacgtatacacacacacacacacacacacacacgcacgcacgcacacacggtattttacaaggacagcaagctcaatgcctttgtcctccacttctgggcatttcttcaaaatgttttaaatctgaatatactactctttaccggtaagttattagtaaatgcttgttgattaaggctaatcttttttttttttttttgagacagagtctccctttgtcgcccaggctggagtgcagtggcacaatctcagttcactgcaaactctgcctcctgggttcaagtgattctcctgcttcagcttctcgagtagctgggactacaggtgcctgccatcacacctggctaattttggtatttttagtagagacggagtttcactgtgttggccaggctgacctcaaactcctgacctccggtgatctgcccgcctcggcctcccaaagtgctgggattacaggtatgagccaccacacctagccaattaaggccaatacttcaataactgttcattaaaaagaaataatgttttttaaaagaaaaaaaactgacttttgttttagctgttggtactgatactatcagtctataaacactacaaacacacagaaagtgagataatgctttggaaaaagattaattttctaattctgagctaactggcccaattttacttgtgaaaactgctctataatttgtcacaactctaatttacaccaaactcaacataattttcttaaatgcttctcaaaaaaaaaaagactctgaaagagaaggacttctggaaaattagcagcaaagaatcatgaagaacaatatttgaagcctctatacaacttttataaaacatttgccacaaggcaagttttggtgtgtgcaaaaatccatttgtagaccagctgtgacagactctttaaagcatatccaaggcaatgataaatgaagcagacattcatgccaaacgcttggatttagatttacgtatcaagaaagctttaataagtaatcctacaaggaatacagttgtatctacattttgtgtaagtaatagttgctcatttctttttaggggaggggggaatgctatattcatcttttaaaataaattcttcatttttgttttgttattttttctccttagtctagtgaagagagagtcagacaggatattctgctatgaggccctggcaaatctagtccattgttgtggggagaggggcactttgatctggaagatacacagggactcagatttagaaatgcagcctggaaaaagcattctagtgctgaatggacctttgtctacaggaacagttcctgagacatgcatggaagagctgaaacaggacccagcccacaggggaagagagcttgcagggaaggtggggagggggacagaaaagtaggctgtagctattccaggtgagttcttcggtatcaagagagtttagggaggttggattatcctccaggaacttcagcactggagcctacaactatctaggaccattttaattagctaatctgctattcacatttataccccactcaaccaaaactctactagcttcagggaaaggtggaggacactacagaattggtactctgattggctagccaatcacagccagctgttgagctgggttaatgctgtatacagggtccaaaacagtgcaggttgggcgacctctgttttattatttaagagataactgaaagtttctttgcttttgatacaaaaccaaaaatcattaaatgagagaacatttttaactaagaaaaaaatttttaaactgaaaagtacaaaaaatacacttatccaaaatcaggcatatatgcatctgaaaggtatatctactaaagtgatatgacataacaattttaaatagtcctgaaatgttgaattaattatagtaaccatgagcactgctttccgaacagctttgattctgaaatgaacattctttgtatttgatgacactaattcagcctttttgtggtcgatgctataaatgttacggaaattatgtactgcccatgttcattacctaaatttcacataataataggtttgttaaattaatttttccctaaaatagataaaacaattactccttattaagcattaatcacttgccaaatttaattttctaaaacaacctcatttcaattacacacaagtcttagatttggtattttcaacttttcattttattttttcaaattcaaatagactttagattttaaaataacagaaacactttgcaggtagtcccttggtttataagtggtgtgaaattcactgtagcttctgggaactctgaatgctttgctccagagaacaattatataaatagttaactctgaggatgctgtcataaaggtctattaacagtactagttagtttaacagtactagttagtaccattaaatcagctctaattctaggctcttgggatgaaagtgtggggggaaaggaagttaaagttttcatcccttttcccaggcacagacttcgtcccaagcagacatctgaagtgggcaaatggaattttggcatagtttctaccccctttcccaatacatagtcttttcctacatcctcttgttgtttctaccagtcacaaggtcttcatgcttcctccatcatgttatgccattttgatttgccttaagttctccaaatgtcccatatttcaaaatttaagccctatatcaccatccgatttcacaggcaacacaaagaatgcgaactgcttctaaggagtaagtgaaagaacatgcctaaacctttttaaaagtaattaagttccatgactatgaacttaaataaatgtataatctatggggtcttaagcagtgtaaaaaattaaagtaaaagcaacattttaaaaagaaagctagggaatataaagcaaggtatttggatgcagaaagttcctacgtaagcagattagcactaacctaaaagcgtacgatttttcactttcctacagtttcttcccctttcccctaaacatagtttctcaaaatctagtatcttcaaaattgacctaaaaattgaaagagaaacaagccaacaatgtccccttagatatatatacacacaaatgaccctaggaaatctgttttcaataaaaaacttctagaatttggtttaagaaagaaatgtcctttcagtatgtacatctgatagttgtataatactgttcttttgtacctcaatgctgatcaaggttggtagagaaatgaatgtttcttctaggagttgtaaccatttcatcataatatattcctcatcaagactctccagttgttctctattgtctgctatgtcaaacacaactcttgaacaggttaggggcttaggtagtagagtgtaaaataactgaataggaacattgagatattttatggcaaacctccagaactaaattgaagggctagaatcccatcttttcccatgaagccttctataaagcaaagatggagaagtaacaatgaaccctctcttctaataatgtgacataggttagcgcttaatgtatatactgtcttgaattattctctgtgtgtttcatatactggtcttattctctgggtagataatgaaagcctggaagtagattatgtacaatttgcctcatctctatttattttcccagtttccttattatagagcacgctttcactctcaacagggtactggtttggaagatacacagccagcttatccttaaagtaaaagaccatgtcttaagtttcttttctgacatcaaatacctactatacactcaagggaaactttgatttgtttgactgaactccaaatttattatggagtcattattttcttggttacagtctcatggccctctgtactttccataattagcatttaccacagttgataattacactgaatgattagctgtagaatgcctgtatctgcatttgattttactgtgagcagtggtactcaaaaccaggagtagtgatgtgctccccaccctcactggacatttggcaacacatagagacattcttggttactgccaatgtgctgagggatggagagataggaggtgctgttaccaagtgcagggtccccacccctgggccgcggatggtggctgttaggaaccaggccacgcagcaagaggtgagcagcaggtgagcgagcattaccacctgagctccacctcctatcagatcagctgtggcaacagattctcacaggagtgcgaaccctattgtgaactgtgcatgcgagggatctaggttgcatggtcctttgagaatctaactaatacctgatggtctgaagtgcaacagtttcatcccaaaaccgtcccccctcccacacaccacccaggttcacagaaaaactgtgttccatgaaagcagcccccggtgccaagaaggctggagacagctgacctcacgggcagaagccagggatgctgctaatcatcttatagcgcacaggacagcctgctatgacgaggaagaatgatcgggttcaaaaatgctgaagtgaggaaaccattccatgaagtcaagaaccctattttgacttacagtcttccagcagagcagcttgatatgtaggaaatcatcaataaatatttgccaaattaataaatgtatcactcaagtcctttttaattattattggtttttttggagacagagtctcgctgtgtcccccaggctggagtgcagtggcacaatcttggctcactgccacctccgcctcctgggttcaagcaattctcatgcctcagcctccagagcagtggggattacaggcgggcgacaccacgcctggttaatttttttttttttttttttagtagagacagggtttagccatgttgcccagggtggtctcgaactcctgagcccaagtgatctgcccgcctcggccaccaaagtgctaggattacaggcataagtcgccgtgcccggtctcctttttaattcttatactggctccttcttactccttgcctgtcttgtcatatgtgcaaacccacctgaagcactggaaattgagggtttaaagtgtaagcatatctttgaaattctccagttactactagtatactgatagattcactgataagaaagcaaaactattggatacatttagagcttcatgttaatcatgttctctatgttacagaattataaattataattacaaagaaaactctcaagattccccaaagtgttttcttataatcttatcataacaagccttaagttagtcattagataagtttagaaaatagcaaatcatatttgtaaagaccagaataaaactctaagactcatccacatcatccaaaatgaacagtaaaagaacccttttatcataaagcaattccacctaaagatcaaagcataagctttggtgggatatgggaatccccaaagtatgcattaaaatgtgaaggcctttcttttcttaagtatttaggcatggccaaaggaagtaagaatctgctggtactgtagggggaagctaggagaaaagggtcaagcccaatcaaggaagtgaccacaagaagtagtggccagcatgattgagagattggttatatacagaagatgaaccatataagtcatatattgtagataactgaacccctgtttctcactggaagttacaaatataaaaaggatgaagctagaatggactctttggtgtgagatagaaattgaaatgtcaatacaaattcagtttttaatatacagatgcagaaatcgtaagaataagtgagtatgtcatacaattatttcctaattttatttttaatgaaagagcttgacaacagtgacactcaatacagggaacacaattgatacccagatttagggttctaaatatcattctccacacaaaaaagaatcaagagtctctggaaaactgctgattccagggctgaagcagggatatcacaagcggagctgggaccatcttactgtgccagagagtaagaaggtgctcagagaatgatggggacatgttaaagggcacagaagtttgaagggaatcccgctggccacatctgagacaatctggatatcaaaatacataatacgaaaacactatgactcatttgttgaataaaacaagaatccatgagcccatattgataaaaataaataatgaatctatgaatggagagtttccttataagagaatcccaactaatgaatgttgaagaaacaacaaattagaaagtcaccacttgacattcatcttagtcacaactaagttaggcaagaaacatcaataaatgctaaaactaatgagtcaaagagaaacataatatttacatggtctcaaattacctccttagaaaataataacaaaggacaaaagagtacctctacagtggagaaaactagtagtcactaccttcaggtgatcaaagttaacatcagtaataatggaataaaccaaaattgagtatcaattcagaatacaataagaacaaaacatcacttttgtgacattgctgccaaaaatgtataacctacatctaatcaggaagaaacattagacaaactctaattatgggatgctctacaaaataactggcatgtaatctttaaaagcataaaagccataaaaggaaagactatgaagccattccacatgaagagagtaaagagccctgacaatcaaatgcacagatcctgggttagaattttgcaatgaaagacattatcgaaagaattggcaaaatctgaatggggtctgatgatcagatggtagtgattgatatatcactattaatatcttgctttaatagttatactctttttacataagagcatgtcaatgctacaaaaatgcaccaaagtaatcaacagtaaaggagcatctcactctcaaatggttcattagaaaaagcattatgtgctcagtgcactggctcatgcctgtaaacccagcactttgggaggctgaggcgggtggatcacctgaggtcaggacttcaagaccagcctggccaacatggtgaaaccccatctctactaaaaatacaaaaattagctgggcgtggtatcaggtgcctgtaatccctgctactcaggaggctgagacaggagaatcgcttgaacccgggaggcggaggctgcagtgagccaagatcgtgccactgcactccagcccaggcagcaaagagcgaaactccatctcagaaaaaaagataaagaagaaaaagcattattcttacaacttttctttaagtttgaaattatttcaaaataaaaataaatgcaatgtcaaagttcttacacttgcagtctctacttactttttgatacagatttatctaattaatacttttttttttttcatatggaatcttgctctttcacccaggctgaagtatagtggcgcaatctcggctcactgcaacctccgcctctcaggttcaagcgattctggtgcttcagcctcccgagtagctgggactacaggtacacgccaccacatccagctaatttttttgtattttcagtagagacggagtttcgccatgttggccagactgttttctaactcctgacctcaggtgatccacccgcctcggcctcccaaagtgctgggatcacgggcatgagccaccacacccagctatctaattaacacttaaagctcttaaataggttatggtaataaatttcatgcatttgttattcacttgacaaatattaagtgccagactctctgacaggcactgggaggatggtagacaaaaatcactgctttcacggagtttatatttccatgggggagaaaaaaggttatatagtacgaaaaatgctaggagaaaaatatagcaaaggagggaatataatactttggggaagactaaagtaaccaagggaagtctcattgagacggcaacttttaaggaaaattaaaacgatgtgaggaagctcgatatagatacctgtgggaaagagttttcttgacatagggaatagcaaggctttaagatggaaaatgcctgacatgttccaggaagacaaaaaagctgcaataagagcatgaagcaggaagtagcagaaactgagatcagagaggtaatgaggagccagatcatctagagcagcagtccccaacctttctggcaccagggaccagtttcatggaagacaatttttccatagaccttggaagaggtagggggagaaggtgtcgggctgaaactgttccactcagatcatcaggcattagatttcattagattcattagttagagttagtaaggagcgtgcaacctagatccctcgcatgcagagttcacaatagggttcgcactcctatgagaatctaacctcgcatctgatctgacaggaggcggagcttaggtggtaatgctcgctcacctcttgctgtgtgtcccaggtcctaacaggtcagggaccagtacttgtccacaggctgggggttggggacacctcatctagagtcctatagattcctgaaaggactttcggcttttactgatatgggacgctacaggaggtttctgagcagaagagccaaatcattctgacttaagttaagtaggatcagtggggctgctccctgaaaaacagaataaagggaggtggctcatgcctgtaatcccagcactttgggaggccaaggcaggaggatcacttgggtccaggagttcaagaccagcctgggcaaaatgccaaaacctcgtctctataaaaaactacaaaaattagctgggcgtggtggtgtgcaccagtagtcccagatactcaggaaactgaggtgggaggagagcttgagcccaggaggtcgaggctgcagtgagctatgatcggaccactgcactgcactccagcctgagcaacagagtaaaaccctgtctcaccaaaaaataaaattaaattaaattaaattaaattaaaaataaaataaaataatacaaggacaaatttgatgagagaatgtccatcaaatttaactttttcatgacagccagtcctatatcataaagtacaataaaaacttaggtgaaagctaaattactaaatcatattttatgctataccttcccaaaataacatgatgggtaatgaataatattatgaattaaaaagaaaaaaaaaataaaaattcaaggtcttgttccaacatccagatttctttttaaaatgaacttatttcttacattattaaagcaatctgaaggtcacatcttagtgtaagtttaagaaatgtacttaaatgagaacagttatttaatcttataacaactgtagtaaatgcttcacaaacctaggaaagaagaaggaaaaagaggagatggtaatacgaaaatcacaaggcaggagaaattaaaattaagaaggataaaaggaaggttctgcttctgtaaatatcagattgaataattcagatgaatactccactgagaacaatttaaaatgtaagacaaaattaggactctgataagtcaattgccacattaagctgaaatcacaaatggctgatcgttaatgtcaatggggaaccaaaaaataaactaaatcttgcacagatctgcaccctagattcatgtcacctgagtggaccaggaaactttaggctttaaacttgggttaggctactcctagattgctatccaaggcatccagcagatattaaatgaagataactttactcaaggcttcattttgtctttttagagacagggtctcactctgtcgcccagacaggagtacggtggtgtggcctttgcccactgcagcctcaacctcctgggctcaagcatcctcctatctcagcctctcaaatagctgggactacaggcatgtacctctatatctggcttttttttttttttttttttttgtcatggagacaggatattgctatgttgcccaggctagtcttgaactcctagtctcaagtgatcctccagcttcagcctcccaaagtgctgggattaccatgggagccaccatgcccaacccaaggcttcatatttctacaaataattttcaaatactatgcccagctaacatatttaatcttcattattcatggattctgtatttgcaaattcacctactcacctaaaattatttgtgataaaaaatctgggtgctttaggggtcatttgcaggcatagagcagcaaaaaaatttgaataaactgatgcccatgttctcacatgaggctgaacaaggtgtcactcagccttcttccttcagctctcctattacaaacaatgtccttttcacagtatttagtgccatgtttttcacatttttgtgcttcctgttggtgatttcagtttaatggccctcatgtatagtgttgaagtctcacctagtgtttctcagcaaaagaaggctatgatatgccttatggagaataaatgtttgtttaaataagcttcattcaggcatgagttatagtgttcatggccatgagttcaatgttaattaataaataatattaaataagatgtcctcaaacagaaacacacataaaaccaggttatgtaattgatcagctgatgaagacgtgaccagagacttgcaagaacccagccctgtatttcacctagagcaatgggtcagtatctgtggcccctttatgtaacataactaacatgaataataaccagcacagccagtatttataaccagcatctaataagccaagacaccagagcagggacttcaaatactgaaagtatcagacacagagtgtaaatgaaacaactacatttactctatgtacaagaaaacagaagccaaacttgaaattttcctcagtgaaatataaaactatacaagagacatgtctaatttggaagagaaacaaattttgagaactgaaaaatacgatgtccaaaaataaagactcaatggacaagctaaatatcataatttagacagaggaatgcttatcttcagtgagtaaaagaaaataaaccctgacctagaactgtcttactcagtaaaaacatcctttaaaaatatggaaaaaatgaatgcattttcgcacaaataaaaactaaaagaccatcaatggataaatggataaacaatatgtggcatatacatacaatggaacattactcagtcttaaaaaaagaaattttgacacatggtacaaaatgggtgaaccctaaagacattaagctaaatgaaataggccagtcacaaagggaaaaatattgtatgatcccactcacatgagttactttacccttaaccatttaaacacattaaatgacaactacaagcaaagcccatagcaccacgttggatatttaataagaagtaactgttagctgggaagagatactattaacttaatgatgttaaattttttaaggaaagatgaatgtactttaaaaaatatgtacacattttaagaaatataataagtattttcttactgaagcaaaaaggcacagaattttgattcctttatcctggaatctctcttgtctcaacgttgcactgtcactaatccaaactgagtacctcataagaaattgggatgctaggacaatttctaaacgtcaaaataacacattttggtcaggatacctggcaactgtaaatgaataaaaacatctacagttacccccaaatttctgaagaatacgtttaatatcttcttaggaattctgagtgtctaagaatttctggcatgtatttagtgactaaatcatgtgaaatggatacttaaattatgtttattaaagttatctttcattcctagaggggaaaaataatcatttattctgtttagattgctgatcatctgttcctaaatttatgtcaacagaaaatactaaaaatcatagacaataaatttgctatgtaatatgtttattaaataccccctttgaaactcctttgtaataatttgatcaagctaacacacatttttcagaagcaaggtatttcaggaagaagagataatgtcaaaattatcttttttatctgactgatgtataatcaatgatccaccctctacagatggctatgaaagcatccaaaaactgtttctatgtgacagagcgcatcatgctccaaacggactgttttccgtactattaataagactattaacatactttctctcaaacccttcgtttcaatcataagtcccacttcaagactcatgaaataatttcataaaataaacaggatatgtgaatggttaaaacattgacctaagcacatctggcaacacaatttatgcatggcaaggtaaagatcattgacactgtatttaaaatgtaaatcttctaatctcccaaaatcatgtactcactgttccagaaacatttctagaacgaaccagagctttcaggattagggccaagtatattatagtgaattttaatgttggcttatggatctgatatctgtcatttacttactttatgacataaagacagacttatctgagtagaaaatattttaacaacttatgaaagcaaaaaattgatatttctaagtataattactcaactatgaaatcaaatatcaaatttttctactgaatgaaaaattatcccctcattctccattaagtattgcctactagctatacaaaattgtacggcttattactctaataaagaaaaacaatataaagtttattttactactgttaactaataaactaaaaccaatttctaaatcatcattttattctactgaaattcgcatacatttttaaaaagtgaataaacagcctactcagtagaatttttgtttctcaagattctaataagaacttagaacaattttatcaattaaaaatgatataaactttacagcctcagaatacatcacactaaagtaattttccaattggtaagctatatttcagagaatcctgctgtctttaaaatcctatcataactatgtaataatacaaactttatcaattatattcaatgaatgagaagctagtgctttactgtgaatcacttggaagttcaccttaatatttactttaggcttgagctcaaaacccattcaggacaaaagactctaccagcccttcatggatatctgtttatcactactggcttaaaagcatgccaactgattggggaaaattttgcaacagatttaaaataaggaaggagtcacagagcagatgtacacatcaaaattctatagcatactcaaatttaaatgaaaacgattagaacaatgtcaaaaaagtttagtaaataaatttgggatgtttgtgtacttatcagaacctcataactgcatataattttgtaagtatattcaaaattacagttattactgaccagtgtctttgagtaaaaagcaaaagaaagttatttgcttactaattttagaatttaaatatcatatttcctttaaggtttaaaactccttttctgtttatttccatttcagacacgaatagtacttttgctttaatttcaaaagacttgtaaatggacagtcttcactttttcatcaatctaatcagcagaatactgagactacgaagttaacatgaacaccctccagtggctggctctgcagcacaacagaaacatttttaccctgaactcggatttcactgccgatatttctgaatgacagaaaatttggggcttatacaacagattacaatcatataaattttggtaaaattccaaactttaaaaataaaaacatctaagtcgctactttatgcctctatttgcaaaattctcatgtcaaaattttctctaccaaggtgttaagatactattttaataacagatataaaaataattttaattcccttttaatctgttgtcatttgtcattattaatattcagaaactgaaataaaactctataaagtaaaaggggctggaagaaaattagtcaaaatgcaaataatgaatccttatgggaaaaaaatacatttgtgccgtgtatcaaaagtaacattttttaagtactcattcaatagtaatctcagtgaaacactgtgtactgagagtacaattccctatacatttgatttaatcttaaaagtataatacacaaatacgttggtaggaaatagctgtatttttaagaaaactttcactaaaatttatttcagtttcaaagagaagtaccatattcctattaacattttaaatataaattgttaaaatcccgagtactgacctctattacagaaaacaaaattggtttaaaaatacacagtaacaaagaatggtaataaaataaataaaaccaaaaaagtctatatttaactggctgctcagtcattagaaaggtgccccataactaccatatgttactcaaatatgttatcacacctacaatctcatcatatgtctcccaagaaattaattagctctaactttttcaactttgacaaaaacgtctgcatcagtcagattactagctgttgcaaacatttcaaaattcaaagctttctccagcttgtatttaaccttttaattactattaatcatttagcaacatttagaacagcattcattagacagatgtctaattctagaattctgaataatgtaaattcatttatacatatatttacttttggtgcatatttattgatgttaaaaaataatccaaaaccacttattgatacatcatttcacggctgtgtttagggtaaagagaaaaatacctaaaagttttacttattctaaaaatctaaaaagtcctaagtatttgagattatatggcttacagtaatacatttaatgtgtataaaacttatttaaattttaaaaagaaacaagaggacttgttaattttaaaagcctttataagttaccagcagtaaaaagaaatagaagtgactaagaagagaattttcataaatatcttccttaccaccaaactttcaaaaggaaaagaaaaaaaaatactactattactgtttgattttgaaccgcaaacccaggcaaccctcaaccatgtaaaccagcttccatctccaccactttatttaaactaccctggtaaggctaccaatgacttcctaagtattcatttcacaaatatttattgagcgaagaacaaaaatcccttcttatagagtttacattctagcgggattgaaagagaaaattaacaggataaataagttatatgatgtattattagtaggaagtgctaatgtctcctgattcccttgttaaccaaacaaaaattaaacaataaagtttgaactggcttcagtaaagtcacagaaaacattactaaattctcctttcaattatctctgctaacaaaataatggataatctaaaaataatctctatttagtaagaaattagatttaagttacaaagttactcctcaggccgaagtaaacgttcaagttaatcagaatgagggcagcctcaggaacagccaaaaataccctgctggcagctgtcttctctttgcagctaccaaggtttttacctactgccacagaaaagggcacctgtgaattatacaattttttggctgaaaagaaccttaaagatatcaggtgtcctctacaaagcttttcttggcctgtccaaagaggtttaagcatttcttcctctttatttccaaattccataaaatgcaggaattatgtctttatttgtgcctgtattctcaaaacttattgtaagtctggcacagagtaagtttgagtgaacttttaaaaacactattttagaaaatcagtctggtagcaaatagagcaaaggcttaaggtttgtaatcactgttaaataatttgtattacatatatgtgcactgctctcaactggtgaggaggggcatccattcatattcaataaacatttactaaggccctactgtgtgtaagactaccattacagagggtatcccagggggagaaagaaaataaaaaagaaaattaataataattttaaattgcaattagtcctatgatggaaatgtacagggtactttaatagagaatctactgtcttcattggcttcacaaagaattaagattactttatacacaatgttctgccagggaaaggcaagaccttaggtagatattgcagtaatacaggtaaagagattaggagttcaattaacatttaacaaacattacaatgtctcatgttctatggcacaaacataaacaacccccaatctccaatctcagccactcaagagcttgaattcaaatgaggaaaagacacataaaatattatcttgattgtggagaacacatagactttatggaatcacagagatgaacatttaggcaactagagtagtgaagaaaagtttcctagaagaagaaaatgcctagaataggcaataaatgaaaacataaatagcatgtattttgaaggaataattaacagtagaagataatagcacgtgcacaggggactgaagtaggtagaagatatgaatgtttctagtctggtgatttgtcagtagaggaaagctgaaaggaaattgatattaatgaaaaagaagataatctcagtttttaaaaatctgaacttatgatgacaatggcatacccatggggaagtttttttcaactacaacactaaagagaagttctttgatttgttattttaataagtacctggaattcactgatacacaaagaagatttgtagccatgacagcagaagagctaagaatttgcagagggcagaaaaggctcaagaacagagtaaggatgggttatagtcacattatgtaggtatcaaaagaaagtatgtcagtaaaagagcacagtccaatgcagcaatgaaacaggaaagccaaacatcagggaagccatgggagatgaatgtttcaatgaggagggggcaatcaataaattaaatgatagacacacccagaaggcataacagagttaaggccattggttatgataaaaggagataatcagtggctatagagaagagttttatcatgcctatggtttcgttgatcataattaatcacaaagatgagcatagactaatatatgaaccacattctcataacctcaattttattatttttataaacatacctaatatttattagaatggatatataagcaaataaaaaactatatagagtatttccactaatagataactttttaattaatacttcacaagaaagaagtattttcaagttaaaaaaatacccaatagtatatattttttgaaagatttgtcatttagagataaaaaatttacatatgatacagtatctgagatttgcttcaaaataacccagtgggtaaaggagtaagtggatatatagataaaataagattggtcatgagttgaaaatttttgaagctggtgatgattacatgggtgctgattatacttgcctctactttggtataagtctgaatttttttcttaatgtcttattgcctaccaggaaacagaaatattttaattttccctaattatatttactatttgcttacagggttctgaaactaatctcaaactgtcaaaagtaatgaaaacggtaaaatttccataggatcaaagcttagaaaattgccttataaaatatatagagagggggaaaaaaataaagcataaacaaactctagaatttagttctggcttcaagaatatttaaaattataaaatgccataaactataatttaaaaatatttagaatcaaaaaataaaaaataaatgccctgttttccccagaagctaggagatatacatacatatatataatatatatattttataacaaatattatattgctatggttctccatggataattacattacttaaggcaaaaagtctttgacaaaatcttacatagtgacacaagtaggagcttatacctgttacagctaaaattggctttcagctgttaattttaactgatatattcttacatgtttcctcatttccattgctaacagttttttcacatgagtaactccaattcatttttcaggtctctgttgaaatattacttatttcaggagtttgctgtcaacttcacacagtaggtcaaaatgtcattctgtatactcctacagaacccttctctatccctatcaaaaacagttcattttagttaggtgccacaacttttaaaaaactgagatataggccgggcgtggtggctcacgcctgtaatcccagcactttgggaggcagaggtgggcagatcacaggtcaggagttcgatactaacctgaccaacatggtgaaactccatctctactaaaaatacaaaaatgagctgggtgtagaggcatgcgcctgtaatcccacctactcaggaggctgaggcaggagaatcacttgaaccgaggaggcagaggttgcagtgagcaaagatcacgcctgtgtactccagtccgggcaagacagtgatccgccacaaaaaaaaaaaaaaaaagagagcgatagttcacataccataaaaatcgccattttaaagtatacaagccatagtttttattacattcacaaggcagtgcaactaccactactaattccagaacttttcatcgccccaaatataaatccagaactcattagcagtcattctccattccctcatcccctcatctcctgaccatgaaaccactttctgtccctaaggattttcctattttggatatttcatattaatgaatcatacaatatgtagccttttgtgtgtagtttttttcacttagccgagcttttcaaggttatttcatttcttttctgtctgaataatgctccattttatgaataatcataatttgcttatccactctacagttgattggacatttgtggtttgggaggcaattacgaatactactactacaaacattcacatacaagttttgtacaaccatatgactttgatgcctttagaaatacacccaggtgtagactgctgagacctacaactctatgttttaagtttttgaggaactgctgttttccaaagcagctgtaccattttacaaacctaccagcagcgtatggggattccaatttctccatatcctcaccaacactgtttatcattgtttacagacatcctaataggtgagttgatatctcacatgattttaatttgcacttctctgatggctaatgacgttgagcatcttttcatgtattattggccatttgattatcttctttggagaaaatattcatattgtctattcagatttcttaattgggttgtcttttcattgttgagatataagaatttttaatatattctggatactaggcccttatcagattcatgatttacaaatattttctcccatactctattcttttcactttcttaaaaattgttgtttcctgaagaccttctcactttcttgacagcggcctttgacatacaagttttttattttgatgaagtatactttctttttcattgactgcttgtgcttttggtgtcaaatgtaataaaccattgcccaatccaaaattacaaagattcacccctatgttttcttctaagagttttagttcttataatttaggtgtttaatacacattgcattaatttttacacatggtgtgaggtaaggagtccaaattcattcttttatatgtggaaatcgggttgtcccatcatcatttcttgaagactattcttccacactgaatcgccttgccatccttgttgaataccaattagccatatatgtatggtttaaattccggattctcaattatattccattgatctacttctctcctctatgtctctttttgactgcacctagcacagtgcctgaaggtgagaagcactcaataaagatttgtgagttgaacagccaactccatcaatagtaaaatgatagaatttctggggtaggaaaagccttagagggcattatcctatcccattatttaataaacaggaaaactgaaacctaagagaggttaactgactaactcaaagagaacaaattaatcataggtcaaggtaggacctgaatttcagtctcctaattccaatccagagctcttgccatagtatcatactttttttcaagtaaaactaattgctttaacatccaccaatgtgcctgtctgggagaagctgcatgtatatgagaagacagagataggcatgtatatgtaagctcaatcagagtggaatcctttgtatcaccaaaaagccttacaaccaaaatgtgccagaaaatagtataccacagaatacaatgttcctttccagacagctgtttcttaacttcattttgtgtttgagagatacctagtcacacttttaagcctggagattattctaaatagaaaaaaaaaaaaaacatttttgggacagcaaaaatgatcaaatattcagggacctagttccattactctgttctcttctacatttcccaccaccgttgtcattcttcattcattactgttttaaagactgtagaaacagagtctgcctgcttccaaaagccagagaaatttaaaagctggagagcagagaactaaagggaaacaactgagaagctctgagagaagtcttctaaaaagatatatggggggaggagaatccacatgataatgcatgatttcagggaaaaaggaagaggctagatgttcaagctaaatactgcattcatatgtacatgtgagggaaatgctgtttgtgcaaatgttgtatatgtaaaatgtataagcagaccacgaatgttcttgtagtcaaaatatttaagcctcagttgaaactacaacctcttctctgaatctttcccagagtccctcaaatgcagttaactattcctttcctattgctcccactcttcctactacacacctccattactatgattattagagtgtattctattaattacatcatgtttgcctccctcctaaactaccttctcattgagggcacagaccatgtgttttccatgttctattctgtgcagaacctaacatagccctggcacatgtaagtactttgtaactctttgttgaatggatattttaagactgcttataatactgaatacatctattctaaagtgttgataacaagaaatttgttaattcttgctgtaataattccaaacattattcacacataacttgccaatacttacttgctctaagtacaaacttcagagttagctatctgcaaaaaacaaaacaaaacaaaaacctaacaatatatttagaactgaatattgtagttgtcagtcatctctgctaacaaggcatttctatatactcttagctaaaaataccacaaaaggttcaagtaagactaatcaatgacaagcagaatggtctcatgtggtgattcaaaaagaaactggatgccatgctacctgacttcaaactatactacaaggctatagtaaccaaaacagcatggtactggtaccaaaacagagatacagaccaatggaacagaacagagccctcagaaataataccacacatctacaaccatctgatctttgacaaacctgacaaaaacaagaaatggggaaaggattccctatttaacaaatggtgctgggaaaactagctagccatatgtagaaagctgaaactggatccattccttacaactcatacaaaaattaattcaagatggattaaagacttaaatgttagacctaaaaccataaaaaccctagaagaaaacctgggcaataccattcaggacataggcataggcaaagacttcatgtctaaaacaccaaaagcaatggcaacaaaagccaaaattgacaaatgggatctaattaaactaaagagcttctgcacagcaaaagaaactaccatcagagtgaacaggcaacctacagaatgggagaaaatttttgcaatctactcatctgacaaagggctaatatccagaatctacaaagaactcaaacaaatttacaagaaaaaaacaaccccatcaaaaaaacaggcaaaggatatgaacagacacttctcaaaagaagacagttacgcagccaaaagacatatgaaaaaatgctcttcatcactggccatcagagaactgcaaatcaaaaccacaatgagatatcatctcacatcagttagaatggcgatcattaaaaagtcaggaaacaacaggtgctggagaggatgtggagaaacaggaacacttttacactgttggtggcactgtaaactggttcaaccattgtggaagacagtgtggcgattcctcagagatctagaactagaaataccatttgacccagccatcccattactgggtatatccccaaaggaatataaatcatgctgctataaagacacatgcacacatatgtttattgaggcactactcacaatagcaaagacttggaaccaatccaaatgtccaacaatgacagactggattaagaaaatgtggcacatatacaccatggaatactatgcagccataaaaaaggatgagttcatgtcctttgtagggacatggatgaagctggaaaccatcattctcagcaaactatcaccaggacagaaaaccaaacaccgcatgttctcactcataggtgggaaatgaacaatgagaacacttggacacaggaaggggaacatcacacaccaggggctgttgtggggtggggggaggggggagggatagcattaggagatatatctaatgtaaatggcgagttaatgggtgcagcacaccaacatggcacatgtatacatatgtaacaaacctgcacgttgtgcacatgtaccctagaacttaaagtataataaaaacatatatatataaaaaatatatatatatatatataaaacaaaaagaaactgaagaatcatctctttagagacatgtaaaggaattctggagggtaattaaagatattgtcatgttcaccgagtatgagtaaaacagaagagtaaaatgactatgaaatactggcttggtggtaaaagtagacgctttgaaatctgaaatcctgattttaatgatttacctccactgtgacctctttaggaaggtcacttcatctttctatgcctctttcagtttatctcttataaaacttgaataagctgtagtcccagctactggggagggagaggtgggaagatagcttgagcccaggagttccaggctgcagtgagccatgaccacacctgtgaatagtgactgtgccccagcctgggcaacacagtgagaccccatcgccccccacaaaaaaaagttttataaaatgagaataagaatgtcatactcacaagctcattgtgagaatcaaattatactgtgtatgacctagcacagacacccagacactagcatataagcatttaacaatgttaatttccttcccaactgacaacaggttgtaaattaaggagcagactcaaaaagttctcttctctataaatatctcccctaacagacgtcaatgtttgaattttaccataagaaaattctgtttggactttcaagagtcccaattaaatgtgaaacaatccatcaatactctagtgtgtttattcatcatttttaagataacttaacaaagcctacaggtcttggagatctcttttgaacagagtgaacagagaaggatctatggatggtgaccattacatgaggagtgtgaaagagcaagaaaaaaaaggtcacaaaagggtcctagagacaaacttttcctactttgtagtatttcttactattagtcccatctaacagaataagctctacataaattcattgaaaattcataaattcattagtaaaccagtatatcaatttaagtttattttttacactgtgaaatataaacacctgccatagttctacatactacaaacttttcccttttccacatagttccacatttgcaggctccactcctttcacaagaatttttcctgtgtttataccattgctacaatactgctttgtgtataaaatcacagctttgagttaatgtctataaaattgatcttgggcacagatcatttttcttgtgaaaaggtttgtcacctgatggttattttatgttcatgttaatcagagactgtctctctataattgtttgtattttttctctcaagtttgatttctgtggttccagaagcatacctgccttcttatcacaagtaaaatagtatttattaagagttgaaatttttgttgtttaaaaaaaagaaaagccccaaaccacaatttaaggatatctttttaaccactacagccaaagaaaagatctacttaggatatactatttgctctatgctttcccaaactgtcaactgcatgtattttggtaacatcctagtacatacagatggcatgatagctctgccatataaattattaataaaattcacataaggaaaaaactcaaaaccattacattgtatttacagatttcaccaagacaatgtaatgtccaaatttcacattgtattccaattattattattattgagacagggtcttgctctgtcacccaggctggaatgcattggtgcaaatatggctttctgcagcctcgacctcccaggctcaatggatcctcccacctcagccacctgagtagctaggactacaggtgtgtgccaccacgcctagctaatttttgtattttttgtaaagacgaggtttcgtcatgttccccagtatggtctcacacttctgaactcaagcaatcctcctgcctcaaattcccagagtgttggcattacaggcgtgagctaccgcacccgtccttgttcctattatttgtttgtttgtttgtttgttttgagacagagtctcacactgtctcctgggctggaatgcaatggctcaatctcggctcactgcaagctctgcctcctgggttcacaccatgctcctgcctcagccacccaagtagctgggactacaggcacctgccaccacgcccagctaattttttgtatttttagtagagatggggttttaccttattagccaggatggtctcaatctcctgaccttgtgatctgcccacctcggcctcccaaagggctgggattacgggcatgagccactgcgcccggccagttctaacccaaattctaagtcactcacccaccggccatcttatgaatcctgtgtctcctccccacctgtgggatccaccaaagaggactccataaagcaaatgtggagacaatgactaccaaaaacgaaagaataggaattcttaacagctccagaaaggctaacaaaatcagtcctggactcattaacttagagaagaaaaagtctaaatccaaaggctagagaacagaaactgattatactctaattttaaaataccaaaatatatttaagatccataatgtttaatacagaactttacaaaatccagcaaaataaatttagtattatttatagacataaaaatggtacttctgctttcccaggctcactgaaaaacccgatctatcaattaaatcagagaaaagaaaataaaaaataaagatttgaataaaaacaaattaaaggactgcattttaaaggccacatagatataaagaacactaaagcatctcttttcttctatttacagcatactgaggattcatccataaacctgaggttgacaaccatcttcttctctactgatacagtgaaggaagcatctctccacagcatgcctacaactgtctctttcttcctacattgcccttcttaatgaatgttatcacatactttccatcaatgaagagcaaaatcaccaaattagttctaatttttctccactagcccatatgcgaaattttaggccaagtcaaaatgatgatgatgatgacaggttaaataagacattttttatgttagaggcacactgctgcatgctttccataaattaattaatcctgcttgtctccactaaagactgtaacaaaatccgtatgttgaaacgctaaccccctagtgtgatatttgaaatgaggcctttgggaaaagattagagttagatgaagttcaggagggtggggccctcaccctcataagagtagtgcccttatcagaagagacccaaaagagcttgctcactctccattatgtgaggcacagcaagaagccagaaagagagccctcaccagaaccccatcatgctggcaccttatctcaaacatccagcctccagaactgtgagaaaacacctagactatgaaattttgttatggcagcttgaacagactaattcagatggaaactattatttcccccattttacagaagaaaaaattatagcttacacagactaaataacctccctacagtggatccaagagatagtgatagggccagaatttaaactcaacttttaaccagtactgttccgctgatgtctctgatatgtctgagtgcctaaatgtatcatgagttgtgctaagtgcaataaaaaaagataaggtgcccttaaggaattcgtatatctaataataatcaagtagtatagtcaaacacatgaactgacaaagaatgacttccttgaggtctggcacctaagaaatgtttggtgaaataaacagaaaaccatcagacagtaatacaatgtaataagtgttacccgagtgggttaaataaagtaaaacaagggtttccaggaggaagcaattgtggttgtgattaaggcaaacactttaacagcagtcctcaacctttttggcaccagggaccggcttcatggaagacaatttttccatgggattggggggagacgggggcggtggggagtgaagatggtttggggatgatgcaagtgcattacatttatcattaaattctcataaggagagtgcaacctagatctgtcacgtgcacagttcacaatagggtttgcatccctatgagaatctaacaccacagctaatctgacaagaggtggagctcaggtggtaatgcacacctcctgccgtgtggcctggcagggggcagtcctaacaggccatggactggtactggtccacagcatgggtgttggggacccctgcactgtaaaacaggtagggtatgagaaaaattgtaacagaaataaatacaatgcagtcaaaacaggatacagttattaataacatttggaaggaatttatcagggatcactagtggaagtaacatataagttgtctttcttatgacaacttgagatgaatagaatcacactgcttgaatgagacataattctaggttgaagggactatctggtcaaaaacatgggatttggaaatgtggctggctgttccttttttgatcccatattcaacactgtactttataatataaaatatattaacaggtgccccatctctcatcttttttggaagacattacacaaagcataaaatcatcctgaaagtacagatactgattcctcgttcaaaagcattaaagaatcctacttcacccacaagataatattcaaattcaaattccttagactggaatgttagacctctcacaatctgtccctgtttttccttttctccctgactcaccttgaggcatgtatcctttatactgaagctacccctacattatctggggctcctaaataggccctgttagaatgtttccatctggactctgggaccatctttaagattcatttcaaagactggcttcctttaaaagtatgaccttgcctattacctcacttagtacactctctcttatgttagttgcattcctgcatgtctccattaaagactataagctgtttgaggcagggcaactaccctgcagaaaaagacatcaaataacatacattaatgcttttctactgggaatacagtgaaaaaaatacactaaagcaaatctttggttatctgtgtctaagtacaataaaaaagctaatgattacaatgcaatataagagcaataatagacaattatacagagtattatgactgaatcactcaactaagccttgcaaaggttgaggccagcttcccagagaagatgacacaaactgattcttaaaagatatgaagaagatacaggtaaagcatacacaaatataaaacagtaccacatgtggagaactactaccagaaattcagtgtcactagaatgtaaaggatgaagctggaagttgcagagtatcatcctatagagacagacaaaaggctttccatactgtgttaagaatactgtgctgtaggccaatggtttagaggtacaaagtataagtgtgtgctgtgtcaaaactaggtttaagttatactggaaatcattttttaaaactgaattaaacagattgtacatgtgtatgtcaaaaatcaaacgttaaaaaggtatacagtaaaaagtctcatcacacccatccatctgcctgtttaaccctgctttctggataaaatattagttgtttttcattccagagtttatgacaatataagcaaatacaactataacatcttatctcctctcctttacataaattgaggtttttccatgattttccatataaatactattcttccgattcttttttttttcttgtcactgaatggacctcatcctaccattctttttcgactatgtaatattccattgtattgctgtaccatgatttacttagccaatttcctattaatggacatttgggcttttccctactctgatgctgtatgttgtcttggcatatatgaagaaaatccagcctcatgcagatatgaatagaaaaagggagaaaaatgttaacaaactttttggattactgttgatactattcaaatcgtttgctgttacacacaatagttgtaggaatcaccttgtatatatcacataacaaacattcctaagtttacctataggatccacttccagaaacgagaagatacatttgtaagtttgatatatattgtcaaaccgtctctaaagtttgtagggactcctacagtgtagattctcctccagcaatacctgagcagtgacaatgcctggttttccagagcaaaaagagaatcctagggaactctaccctttaaaaatctcatccaggaagaattcaaaagaagaatgagaagaacattcaaacagatcaaaaagaaacaggagatcataaggttccaggggacaagcaagagtggtttctcactagtgtcaaatacacagaaatatttaataagataaataattaaccaaaatacaaaacctaaatgattaaaacagtacggtattcatgcaaaaatagaatggatcaggacaggataaggaaaagaaaaatactgcatgaagaacaaaggtaaataaaagaattaaaaataaaggaaagttaatactattttccactaagaagaaccagagctccctagagagctgcttctagaggtaggaaagtatatgacgagactggaatatcttgttgtcccagcaagtcctcaaaaattgatggagacatgtcaaaagaatttaaaagccggcctgaaagtgctttcatgggcccaatctagaatcatttaagcatttcaaaataaatgatgatagtaaaagattataacccattgagtaagacagaattcacgagggagaaagaaatttcctccttatagtaaaaagccaactaaaatgaaaaaggaatgtcagaattagaaaactaccataaatcattaataatgtattcaagtaagaaccctaaatggatgccaaaattggtgggccaaagtttgaggagcaaccagatattcacataatctcaaagaatcatacgacaagattcctattaattataaagaaggaaaaataactttataatgaagaagaaagttggtaaacactactgtaaccaggtgatcaaaattaacattactaggactaggacaaatcaatatgatgtgcctcctgattaaagattattagaaagacatggcaattgaattcaacatatgattcaagattattttttgtagaatgagagctataaaggcaattattggcaatatctgcataaccatattatatcaatgttaatttcttgattttggtaactataattatgtaggataccacttttgtttcaggaaacatgcacttaagtatataagactaaaggaggcatcatgtctcaaatttaccctaaaatggttcaggaaaaaattctatatatttgaacataaatatatttaagtatttaaaaatatgtttaaaatctatataaatatatttaaaatatatacagaaggggagaaagagagggaacagagggaagaaaggaagaagaggaaaaaagaaagataatacaactatggaaaaatgttaaaatttgagtaatgagcatataaactttgtaattgttctaacttttatacagggctgaattatgtcaagataaaattttcagtagatctggaattataacctagattgattctaactccaatttgcattcaaatattcctttgaatgaatccttccactgagtgaaaaattttaagaacacaattgttcctttctatagattactactgtttaaaaaaataagtaaataaacttatgcctagggaaaaaaacaaacactaagaggaattacaccaaaaatgttttaaatttgttttaattgcaaagtagggcataattctttttaaaaaatccaaataatacagttaaagtctcttctatggcatactcctacactcttggtaactactgttaatagagctatacagccttctaaaatttttttctatggaaaaaattatgtatatataattttctttataaacatgataccacatatataaacccttgttttactttacatttttaaagttaaccgtagacattctttcatgttagcacataatctttttttaatggttggttagaattccatagtacgaatgaatgcatttgtccattcatcttttggtgagtacttaagactgtctccaacttttttcatttcatatacaatgctgtaaaaatggggaagcgttggttcattttgttttacttcacattttcctcctctttttatttgttcttagccatttgtacttccctcctctgtcgaatgcctcttcacattctttgtcctttcttctattgggtcatttatctttttcttaatgatttatagaaacacattgtataagaatattaaccctattttttacccagtatataccttttgttgcagagatgatttcacttttacaatatcaaatctttatggattcctaatgccacaataatgttgatgtttgagtgacagacctatggatttttttaacagttttttaaatgtatctaatacctttagtaagtatctattactttttaagttaaaaaggtcatatttttatattccttaaaataagcaaaattccaacaagatttttgatgaaacctggaaaactattctaaaattcacatggattgatggatttatttaatcattcctttttgagacagggtcttgctcagtcacccaggctgctgcacagtggcacaatcacagctcactgcagcctcgaccttctgagcccaagcaatcctcctacctcagccttctgagcagctgggactacaagtgcacaccatcatgcccagctaacttttgtattttttgtagaagtggagtcttgctatgttgttcagcctggtctcaaattcctgggctaagtgatctgcccaccttagcctctcaaggtgctgggattacaggtgtgagccactacacccagccaactagtctctcttaatggccctttggagacaagagaaccaagccaaacatgaagaacaaaaaggggagacttgcctaagagagatcaaaacttgtaaagcggtattggcctaagaatagaaaaataggctacaggaaaacatcttaagtctgcttgggcaactgtaacaaaaataccataaagtagggagcttataaacataggaaacaacttatttatttctcatagttctggaggctggaagtccaagtacaaggcaccagcaaattcaatgtttgggaagggcccattcttcatagatggcacccttcttgttgtgtcctcatacagaagaagaagctaactacttcactggggtaccttcttgcccccatttatgcaggcagagccctcatgacctaatcacctcacccaaagccccttttcttaacactatcatatccgggattaggtttcgacataggaatttggggaggtagggaaggacaaacattcagatcatagcagagaagtacagagaacccagaagcaaacccatatataaatggaacaatgctgatgaattatttaacaaatggaactgggacgattagcgtatctttgaaagaataaaagattagattcctttaacaccatacacaatacacgtatgggcactcacgcatgcacacatacacaccccattctgggtggattaaagaagcagtaaatgtgaaagaactttaggtattttataaggaaatatatgagactctggtagctaccctccaagatggcttctaatgatcctcacaccctggtattcaagcctgtgatattgtaatattacaagaaatatgtatttttatcttcctcccaagctcctgggtccctagcacagagctcctaaagctcttcccgcttcctgagtaataggagtgataaagcatcttttattataaatttggtctcaatccccagttcctaaaacaagagcttctaagaatttctggagtgacaagagtgtcctttgtatattaatgaagtgaactggtgagtggggtccctagatcggttcaggataatggccagtgactagaaagactaaataaagcatgattagagggttagaactttcagcttcacctcaccctcaacctctgggaaggaaagaggagctagaaatggagttgatcatcgatggccaatgatttgattaattatgtctacacataaaagccaaaaccatggggcttgaagaacttctgggttagtgatggcatccatgtgccagcagggtggcataccctaactccacaggacagaagcttctgtgctcaggccccttctgtacctcaccctatatcttcatctggactaggtataactctgggtaagtagggaaaaatgaggagtaagatgagagaagaatgcataaacttcagttaattaaggtgaatttttaaaaaaaaatttaaaaatttgtaaatgaaaagttaacttaaaaaatttttaattcttaaaaaaaatctggtgaaaaagtacgacaaagctaggacatgggtactttagtgctcactttattcttctctatagtcttctgactgcttgaatagtctataacaaaatatgtttaaccaaaatgaatggtaaataataacttagtcaacattttcagcagaaaagatcaaacgagtttatacaattgataatagaaagcagtaccatacacaaacacaaaattaacaataagaaattatgctagtattataaataaacccatgggaaaatgtacaaattccagctttttagtaatttttcatccaaaaaatacctgttgaatgctaataagtccagccattattctagactctgggaagacagcagtgaacaatacagctctcatattaatacactgaacttatattctaaaaggcagagacagccaacaaaaatataaacaaataaaaaagatgctgataaatgctatgaaaacaaaatggatgacgtgacagagatgagggagggagaaaagatactttagattgggtgttctaagactctctgagaagacacccgtcctgagaagtacataatgaaaaatccttcaaaaagctaaggaaagaggagaccaggcaagtgcagaaatcctgacatgagaacaaacataatccatttgaggaacagaaagatgaaagtgcctagactgcagggaatgagggggtgagtatgagacaagattaaaaaggcagacaaggaaacccaggggtcaatccaggttttaacggaattttaaagcttataaaattgggggaacagccctcttcaaaaaaaaaaaggaacataaaactataaaaacaaatttaggtcctaaattgaatatttattcagaataagaaaggaaacgacatcaaattacaaatttttagaaactgccaatcacataaaaaagtactaaattagagtctggcccctccgagttctggcaccaggcaagctcacatccacagccggtgcaccagcatctccctcatgccgggtgatactgccaggtctccaggcaccacaatctccctcacgctggacactgctctctgggcaccaccatagccctcatgctgcacatgctcttggtccacgcacagtagccacagccagcagggctggccttcacggcctcctgtgctccccctcccacccctaggctggagtgcagtggcacaatcatagctcactgcagccacaaaggcctgggctcaagggatcctcctacctcagcctcccgagtagctgggactacaggagtgcaccaccacgcctagctattttttattattatttctgtagagacacagtctcacgatattgcccaggctggatttcaactcccggcttaagtgatcctcctgcctcagcctcccccgtagctgggattacaggtacaagccactgtccaactcaatttttttttttttttttttgagatggagtcttgctttgtcgcccaggctggagtgcagtggtgcaatctcggctcactgcaagctccgcctcctgggttcacaccattctcctgcctcagccgcaggtgtgagtagctgggactacaggcgccagccaccatgcccagctaattttttttttttttttgtatttttagtagacacggggtttcaccgtgttagtcaggatggtctcgatctcctgaccttgcgatctgcccgcctcggcctcccaaagtgttgggattacaggcgtgagccaccgtgcccagccccacctcaattttataatataattttctacacagagaacacagaaaatagttgtcttttgtttacaatagagaatcaacgttttttttttactacttatagtttagaactaaagtttcagcttcacaactattggtgatgctatgtaaatgtctcaaattactgaatttgtgaaaacctctcatgtttctttcacatgtgagttacaagaagattatttttaaaaacttgcaaaaagtcaatcttggtttctcgtccattacccacagtcttccagtgttggctagatgtgtcgtaggatgcgttcatattgctatgcaaaccttcggccaagcaccctataaccatgccagctgcactgccagagtgcacagccatcaaattcctggaaggtattcttacatggagtcagctagcaacagctaaactttaaaatgactgcaggtcacagaaacatatcccactcatcttctccttaggactccagaactgcttttgtccatcccaacacagcctgaaaggatagggtgtgtgacaggaaagaagacaaagtggaaaagtacagtggccttaaccaatttagtccagcttcagaaagatactctgcaagtgagaaaggcctatgctttatgagcttcaaggtaaatacctctgtccagatcattctgagccttaaagatcatcaagaacagttaggattttttcttcttcatgagacaagaaaccagtggagggttttaatcaagggatctgaactatgttttgttaacaaaaacacaagggaaatgcactgacctaaggttatcctctaaccctgatcaaaaagaggtattcaagcacaaagcagaacaaagttatgcttccatctcctgaaaatctgtgtttcctctttttccttatctctggattatagatatacacaaatccagtcatcccataattttcccaaagacttctaattgaaaatagaagtaaaaatttctcaacctacaagtttgtaaaaaaagaatagcagtctttaaaagcaggatagtcagttatttaagtgttgttctacagctattttaggaatggtggtattgttgttcctagctgtgcagccccaatcttaatagcctggcctttccatcagctcaagaaaccacaaatatcttcaattaattctgtttatacttaaattagcaaaagttaactagtaagttcatttctactaacaattaagagctctgaatccaacaaataagtatgtaataagcaaataaaagtaaaccagtcaatcatgaaacttgaagttattaaaagcacggggtgggggggtgcgcggtggagatggtaaaaatgattagaagctgttgaaccagaaatgctggagggtgatggcattcctcagcccttcctactcacccacaggtctcttgttctgcccttccatccatgtttggggagaagggtcaagagagaagcacacagtagcttctcactacataaagtcagctctgctactgacatgctaaaaaagctgtgaagaaaaggaaattaaagaaggcaaaaaaaagaagaggcccatgtaagaactgacctgagaacacagtgtgtattctaacaagcacagaagagcataatacagatacaaagtttaaaatgtaggagtgggaaacacagaataaaaggactgtaggattaggttaatctagaaaaccttggtcccagagtggttggtgtggaataactgccagtcatcatctcatccataagtaagatctttgtagctaaatcataaaggcaacgacaaagtgaatttacatttttcaaatccaattacacacgtgaaactttaacctagtaagacaacatttcaatgagaagctaaaacaattgtaaaaattttgatctagaaaaatatctgataaaggtaaaaataaatgttacccatgcacatttttttaaattaactagatctacaaggcttgttatgaaaaactagtcccagctccctctccaatatttccttttcccaaaagctttctttattcagtgactgccagttgaggaaatttgagatatagctgtttcctggtcctggcatcctccacacttcccacccccgatgtctcaacacaatcctaactttggttagatcaatatttgaggcttatgtcattataactacatagggtattcagagctgaaccaagcagtaaacaataattacttttcttttcctgcataacattttgtttcccttgcaattaataatttgtttctcatttctttagttttctacatacttatctactatatatttatcccaattcaccccagactctccagtctgacaaagctcctttgagtataccaatttgcctcaggtttctatgaatttcatcttctggaagaagtctctccctgtcttcagacttgctaccatctggactgaggaacctaggccaggtacacagctactgtcctaggtgttcctcccactcctctcctacattaatcttcttcctaaaaacaccactgccactctcttccccacctccattcccctcagatcccaccacagaagtttcatgagaaaaaaaatagtgtgtcgacaaagcttggaaaaccttgcaacatacagtcgctttctggaattccctaatgtatgcatttgagaaccctattctaaaaaaaaactttcaattttgattaatccaggtatctctgaaacttaatcagagacaataatctatttttgaggaatacctacctgctaatgatgtacactttgggaaatggtacatggatggtaagctacttgaaggcagggaatatagcttattatactttgcaaactcatgacatctaacatggaacaaaacataggaaaaaaacatgctgaaacaaacacaggtttatataatagtagatgtcatgtatcttggtcatattctaaaagctattccgaaataccaatgatcatcctaggtatattataacaactctatatacatttcatagaatttccactataaattcattatgtgtgagtgcagctatccctgggtattcgtgggggggactgattccgggacccactaaggatactaaaatccacagatattcaagtctcttatatcaaatggtatagtatttgcatataacctacacacattatcctgtatacaggcatacctcgagacattgcacgttctgttccagaccaccacaataaagtgagtaacacaaattttttggattcccagttcatatgacagttatgtttacactatactatagtcttctgtgtaacagcattatgattttaaaatgcacataccttaattaaggatcatctgagccttcagcaagtcataaactttttgctggtagaaggtcttgccttgatggctgctgactgattggggtggcagttgctgaaggttagagtggctgtggcaatttcttaaaatgagacaataaagtttgccacatcaattgactcttccttatgaaatatatctctgtaacgtgtcatactatttatccacagtaaaactttcttcaaaatttgagttaatcctctcacatcatgccattgctgtatcaattaagtttatgtaatattctaaatccttttgttgtcatttcaacaatgttcacagcatcttctcaaggagtagaatccatctcaagaaaccacctactttgctcatccataagaagcaatgcctggccaggggtggtagctcacacctgtattcccagcactctgggaggccaaagcaggaggatcgcctgaagcgaggagttcgaaaacagcctgggcaagaaagcaagaccctgtctgtacaaaagataatttttttaaaaaattagccaggcacagtggtgtgtgactgtggtcctagctacttagaaggctgagaagggaggatcgctttagccagggagttcaaggctgcagtgagctaggatcgtgccactgtattctgctccagcctaacagaatgagactttgtctttaaaaaaatctttttaataaacagataaaaaacagcaactcctcatccattaatgttttatcataatactgcaacaattcagttccatcttcaggctccactgctaattctagttctcttgctatttctaccacatctgcagttactttcttctttgaagtcttgaatccctcaaagtcatccatgagggttgaaattcaactttttccaaactcttgttaatgctgatattctgacctcctcccatgattcatgaatgttcttaatggcatctagaatggtgagtcctttccggaaagtttttcactgactttgctcagggccatcagaggaattgctacctatggcagcagccatacccttagaaaatgtatttcttaaataataagacttgaaagttgaaattagtccttgatacctgggctgcagaataaatgttgtgttagcaggcatgaaaacaacattcatctccttgtccatctctatcagagctcttgggtgaccaggtccactgtcaatgagcagtaatattttgaaaggaatctttctgagcagtaggtctccacagtaagcttaaaatagtaaaccatgctatgaacagatgtgctggcttccaggctctctttttccactgatagagcacaggcagaatacagatttaccataattcttaagggtcctaggatttttggaatggtaaaggagcactgacttcaacttaaagtcaccagctgcattagctacgaccaagaaagtcactgtcctttgaagctttgaaggcaggcattgacttctctctctagctatgaagtcctggataacatcttcttcaccaaatagaagagtgttttgtctacactgaaaatctattgtttagtgtaaccaccttcatcaatgatcttcgctagatcttctggataaattgttgcagcttctacatcaacattgattgcttcactttgcatttttatgttacggagacggcttctttccttaaacctcatgaatcaacctctgttagcttctaacttttcttctgcagctttctcatctctcttcatagaattaaagagagttagggcctgcctctggattaggctttggtttagggaaatgttgtggctggtttgatctacccagaccactcaaactttctccttatcagcaatacggctgtttcgctttcttatcattcatgggttcactggaatagcacttttcatttccttcaagaaatttccctttgcattcacttggctcaagaggactagctttttgcctgtcttggctttcaacatagcttcctcactatgcttcatcatttctagcttttcatttccagagagacgtgtgattgttcctttcacttgaacatgtagaggccattttagggttactgactggactaatttcaatattgttgtgtctcaggagtgagagagacaggggtacagccagttgctggatcattaagaacatacacatttattaagttcatcacctcacatgggtaatggttcgtggtgccccaaaacaattacaacagtaacatcaaagatcactgatcataggtcaccataaccggtataataataacgaaaaagttgaaatactgcaagaattacccaaaatgtgacacagaggcacaacataagcacatgctcttggaaaaatggcactgatagactggctcgactcaaggttgccacaaatcttcaatttgtaagaaatgcagtattagcaaagtgcaataaaacaagctaggcctgtactttaaatcatctctagattatttaaaacacctaatacaatgtagatactatataaatagtcacactgtattgtttaggggaaaataaggggaaaaagtctatgcatgttcagtatgaacgtaaccattcttttttttttttctcaagtatttttgacacacagttgatagaaccacagatgcagaacccacaatgggtatgagaggcgaactgcatacctattatctcaactccactccactggatagaacatacttctctttgcttccaaaattaagtccatcctcaaaaacgcaatacgcctaaaaacaactctgattcattatacctttaaacaacagattactcaaaccagagcattaagtaaaatggttttgtaaaaactgtaaatatatgacactaataattcaacatgtatatcacagtatgagtgcatatactttatgttaatgaacagaatttaaatgagacgaaggataaatggtgaagaaatcttgcccccttccctcgtcaacaattcaggcaaacctaaataagaggagtcacttattccagtccccttctctcaataaggaggagaggaagagaaacattctgcccctgggcggcataaagaacaaactgtgctcctgcaagcttcattcagtagctctggaccaaatgaatcaacatgtttatctgctaatacagctgagctcattttaaagtgttatgcacttaaaaggaaacaaactttttaaaaaacaaaactagtaaaaattagaaagtttttgttgttttagcaaatttagttaggtttatgaagaccaaaaattaacagaataaatcttctattttgtcaaaatgtttattctcaactgaagaagatttaaggaaactcaggctcaaaaacatttgatctaggggtcaaggacagtctgacttcttagttctgccagcagttttttaaagctgcttcctgtactagggaacgttcactgttcttgcacaaacaataataagtcatttatacaaacaccttggttattctttccttttaaattcactggtaataacaaaggctaccatcatgattctaataaacattttgagcttttaccattaaatttctattaatttattatttgtggggaaacaatttattcacttaactcaaaaatatgtctccaatgctgccaatcatgtgcccgacattatagataaaagtcagcaaaagagatacagtcactgccctcccagagcttccagttttgctgacaagatattatggaattatacatctatatatataacccggactatgaaaagggaaaaatataccatgaaagcaaacaacatgatctggccctgggggtcagaggattcctttggcagtgataattaagctgagattagccttacaatcactaaacatgatttgaaacacacacattccaaatcatcctaggagtaggaatgcttacagctacatgggggaggggagaagagtttataggagccaaggtaaaatccatgactttaaaaataaaggtgagagcttcatgtgtacaacaccaagagatcacttatctctgtaggaagaaaagcaatggccattcctagcatactttcactcaaaaacaggtttcgtagctagaactattttccaataataaagccaaacatcagctatcaatctaataatctccaatcatctcaagtcctccaaacacattaaaatgaatttataacagtaaatgtatcacaagcctcaacaccccgtataaacccagtaatgaaaaaagatgtcttaagcttcacatatcacaggtcatctaatgtcagaacagaaacaaacttctagaaatcatcttgtaataaaacacttttcactgtgcaaatcaggagtaacacccgaagtgaagcagcagcacttacaatgtcacacatctagttcagagtagaacaggaggctagagcatggactgcctgagtccactctctatgctttttctaccagcatacagcagcaaatacatgacaagaaacacacgttgcaaataaataaggcagaattttaagacacaaattgcatttcaaaatttttattttaaaattttttttacatatttttagggacagggtctcactatgttgcccaggctagtcttaaactcctggcacaagcagtcctccctcctcagcctcccaaagtattgggattacaggcacaagccaccgtgcgtaactcaaaatttttatacattttcaactgacccacacatgctgcaggctctagaaaacaaatgctccctcttaccacataccacagaagagtaaaactgaaaacaacagctgggcacagtagctcacacctataatcccacatgctatgggaggctgaagtgagaggatctcttgaggccaggggttcaagaccagcctgggcaacacagtgaaaccctgtatctataaaaaaataaaattagccagacacaatggtgcacacctgtagccctagctcctcaggaggcttagaagggaggatcctttgagcccaggagatcaaggctgcagtgagctataatcgcaccactgcactctgcactccagcctcaacaacagagcaaaactgtctcaaaaaaaaaaaaaaagggtgaagaaaaccgactatttattgactccctagggtctaggagctcgactgagtagctcatctactttaacatccattaatcatcacaactaccctctgattagatattattctcattctactgagacccagaaacattagaaatttacttatggttacatagcagaaaaatggtagaagtaggacttgaattcaagtctaaatctaaatccatgtagccattttaccattaaaaagcattttttctttttttgagacagggtctcattctgtcacccagggtacagtgcagtagcacgatcatggctcagctcactgcagcctcaacctcccaggcgtaggtgatcctctcgcttcagcctcccaattagctgggactacaggcgcaagccaccatgcccacctaatttttctgtattttttgtagagatgaggtttcaccatgttgcccaggctggtctcaaacttctggactcaagctattcatctaccttggcctcccaaagtgctgggattacaggcataagccactgtacccagctagtgtttcttcattaaaaaatactatacaatgtgattaggtttccctgggaacttacaaatgcccatttaattgctaatgaaacatattttaaagtttggtctaggataactgccatttataacattatatcaaaaagaactaccaagttttaaacaactactttacaaacaaaatttggaacatattcttaagttaaatgttattcatattttcttttataacattcttttcaaccctgctgtcagtgccaccagaaatgggtgttatctactcctatgaaatgttggctcagacacaagaagaagagtataatgcatgactgcttaagagaaccataaaaatacaagaactacattttaatcattctgatttctccattggtggacagcccattaacagcttcaactgggagagagcatactgctcaaaaataagaacccagcagtccaaatagagcaaagcacatcattaattaaaagaataccagtttttgcacaactacccacaccataggactttctgctttctcagctctgctaaattctgttaccactcacgcaccaggttctcagcttccaatatttagttgacgttgtttgcctgctgtcatctctcatctcgttctctttaccctcatggatttctgcttttatatgtgttcactatcatttaagtggggaaggaaatacatgtcttctctgataatactggagatttttaaagttttcttttgatcccttatggtatctgttttctcccagtgttccaagtatcactccctctccacctctctatgtctacttttttttttttttaatgttggagtcttcccccagatgaccaatggtgttagattgtttgctcatatttaagaataagcccctgaaaagaactaactgaaagatctgtgtgggaaaacagggcttaacgactggtagaattcacttaaggtactctcagcagaaagcctatcagtatctgaagatgctgttatcttcagtcttccacaggagaaggataggacaggcttgactgtgcagttctggaaggagagcagaggaagagagctaacacttctatagttcaggcgtaggtttcccttgatctccttgttttttttttttgttttttttttttggtttttttttttttgagacggagtctcgctctgtcgcccaggctggagtgcagtggcgggatctcggctcactgcaagctccgcctcccgggttcacgccattctcctgcctcagcctcccaagtagctgggactacaggcgcccgccactacgcccggctaattttttgtatttttagtagagacggggtttcaccgttttagccgggatggtctcgatctcctgacctcgtgatccacccgcctcggcctcccaaagtgctgggattacaggcgtgagccaccgcgcccggccgatctccttgttttaaaccaagcaacaatccacggcccctggtttcaaagtccagacagctcttcattaattttgcaaagaataaaccttgttctcctgaggccagggagttggtagtgaagggactcacccatccacaagggcacatagggagaaaatcgtaggggtccacctgtcagtgtacacagattttccgaccagctcccctgttttcagctccatttctgacccctatcttccttagtatctggtgcctccaaatgctgagactcttgggagcttcggacaaacacagtactgcatttcttacaggtatttttgtgcacttacaggtactgtgtgattcctctgcaaagtcagtcactacctgtccatctgcttatttgaaagaggtatagcagcttctgtctcctgttgtaacctctcccagtctctgatttctttcttccatttaggcagggattaggaaataagaagagatgtacaggtgtagccaatctgtcacttttggtcagaagccctgagagagctcttttgaaatcagctatctcaggatactgacttaaggactaaattagtatttctcaaagtccgatcacagacttgcattagaatccacaaggatgcttgtccacacagcagtctgggtgatttttgcttttgctgttacatggaaatcagattaagtcactcccccacttaaaacttcctaataagcagcttctcactccacttaaaagccaaggtctttcaaagcctaaaataatacggccaatgtatgtctatctctgatcccatttaataccattctttccaggcacttttctctactattaatatattctgacaacactggcctagaccaccaaccagtttattgctatctcagggcctttgcacatgttctttcctctgcttgtaacgttcttcttctagttcttgcatggccccttctcatttttcagatctcagttcaaaggtggacagacaaaatgtggtacatccatattatggagtgttatttagccttaagaaggaaggagatgcggacatgtgccacagcatggatgaacctggaaaacactacgctaagtgaaataagccagtcacacaaatactgtacgatccacttacatgaggcactaaagcagtcaaatttaagaaggcagaaagaatggttgttgttaggggctgagaggagagagaaaataaaaaattactgtttaatggctgcagagtttcagtttcacaacatgaaaaaagttctggaggcagatggtggtgaatggttgcaaaacaatgtgcatgtacttgatgtcgctgaaacgtgcacttacaaatggttaaaatggtaaattttatgttatatatattttactacaacctaaaaaatacttttttaaaaaaaaaagcaagataaaaaataagagttatctcttcaaaagacacctcccaagatcactctatgcaaagctctctctctcctttcccctgccaggtaattatctggcacatatcatggtatactttcttcacagaacttagcactatataaaattatcctgtttgtttattatctctccgccagttacagagtaggcacctgggatgtcttctaacactacctacacaatatggtaataaatatataataggaagacactcaatacacatttggtggctaaatgaattaactgtcttctaggtctcaacccagatctactaaatgagaatcttgggattctcagacattgctttattgggagagaaaacttgctatttatgacccaaatagcacctcccaatcccaacagctagttaggacaatttgacacaaatgacctttaaaatagatattctctgttcttaccacagaatatgtgcttttgattggagggttaaacagtggggaaggtatagatgaaagaggagtttctaacattttcataaaggaatgcctgataacatgacaatatagttcctttaattattcttaaatgattaagcatgtataactatcagaagagcttctacataatcaaatagatcactaaacttctttatgaagtaattcaaaagttaggataacaaaaaaaaaaaccaaaaaacagtttttctttttttttttttgagatggagtctcactctgtcacccaggctggagtgcagtggtgtgatctcggctcactaaaagctccacctcctgggctcatgccattcttctgcctcagcctcccaagtagctgggactacaggcgcccaccaccacacccgtctaattttctgtatttttagtagagacggggtttcaccatgttagccaggatggtctcgatctcctgacctcgtgatccgcctgcctcggcctcccaaagtgctgggattacaggcctcccaaagtgctgggattacaggcgtgagccactgtgccaggcccttttttttttttttttttttaagacagggtctcactgtgtcacccagactggagtgctgcagtggcatgaccactgctcactgcagcctgacctcctggactcaagcgatcctcccacctcagcctcctgatctcccacatagctgggactacaggcatgcaccactacacctggctaatttttaattttttttttttttttttttttttgttttgtagagatgtggtctcgctatgttacaggctggtctcaaactcctgggctcaagcaatctgcctgcctcagcctcccaaagtgctgggatcataggcatgagactttgtgccaggccttctatttatgttcttgatattatctaatttcctacaggattttgttctcatatcttctctctgttatctttccatctcacctggacaattctatagctcactcctagacagcaaacaaacacacttatctccccattctaaaaaatattcactcactcttactacatgttcaacctctaattttctctattcctctccacaacatccagcttttttgaagtctactttctcatttcccattcactccttaaccttcaactccacactggcgaatatggtcatcaaccccttaacacagcagttgctctttcattagtcaccaatgagctcctttctgttactcatcatacctccttcactgttttaatcttgctcctccttttagatgacttaaattctgttcatcgctaaagtatgagtggaaagtggggtagtgaacccagacaagactgggtgtggccctggcttcaacagttattgcacttttctgagctgactgacataggactggtctgtcttcctaagggataactgaactagggcaggcactagatcctcatttatctttacatccttgagctctttatatctttatatactgtgtgcttggcacattaagtagacactcaatggggctgtggaaggtaggaaagaaagaaaatggggagggaatgggtggggaaaaatgcaggaaacaattttactcatctttttatccctaagtacaaagtagaaaagttaaccataatagaacctcaattaatgtttggtgacccttactgaatacatatatactacctattgcatgaagatttgggttttgtttaatttcattgaacgtttacatttaaattctgagaactgcacatttaccacaaaactatggttgtaaaaactatactgttaattatagttacagttgctgactcattaagcaaattcatagttttagaaacatagttttagtcaatgaagcaataaaatatactttagcattcttcaacattcagactaggggtaggggatgataaagagagacagcgaagttaagactcaacatgaaatgaggtagaaataaaaagaacaacactgaagtctggccatagggtggttaaaaggctctgtaattttcctaaaattaactttcaaatatatgacaaaattgtcataaataagttagtctaggtttaaagagcttttttgaaagtctgatttctgttacttaagaaaaaataaaatgtctctaatttttaaacaaagcacacataaacaagctgctttcaataaatgctcttttactatatttcaaaggaaaactatctagcactttggggcacttattaaatagtgaaaagaaaaatatttctttctagttaaaaaaggatgaagacaattcttggggagtggggggatccaagtaactgaattctgtctataacttaaagttcctttttttttagctcttattctctgtcttatttccaagtttctatttcctttacttgcttttaaatgtcagtattctccagagtgctatcctctcatccttctcttaaacatgttcattgagcaatctcatctgtaccagaaaagcacactgtttaggagtataccttccaggaccaaatgtgcttgtgtttgaatcctgaccctactacttgctaggtgtacaaccttagacaagttacttaacttttctgtacctcagtctactcatctgcaaatcaaggataaagcagtgccaaccttacagggctgttgtgaggcctcagttaatatatatcaaatgcttacaatgctgcctggcacataatatgttttctaactaagagtgttagctataagagggccatataattcacccagggcacttctaagatttaaggaagagattatgggccaggtgcagtggctcacgcctgtaatgccagcactttggtaggccaaggtgggcggatcacgaggtcaagagatcaagaccatcctggccaacatggtgaaaccccgtctctactaaaaatacaaacattagctgggtgtggtggcgcacacctgtagtcccagctactcgggaggctgaggcaggagaattgcttgaacccacaaggcagaggttgcagtgagccaagatcgcgccattgcactccagcccagcgacagagtgagactcagtctcgaggaaaaaaaaaaaagagagattatgtataataatcacactggagcgacaagagtaaaccagaactaccttaggcaaattaagacagtatcacccaactagttaggataagccataaaatacaatgatatgcaccatttctgccctataaatatcatataattaacctaataatgttcagttccagttaatgaaaacctagcaaatacttaactattatttctgaaagtgggttcagtaggggtgatggctgaataggtcaaaacacttcagaaacatcaagttaaataaagctaagtatgttggaaagatgaagtttaccatctagcctacccaaaactcactggtgtgctaattgactttatagcttaaactagtcttattttgcagctacaaagttattctgaaatgaaattaaaatgagctactagctttttaaaatataaggtatgttatctatgttattcctcagggcctatcccataatgagtattaaataaacatttcttgaatgaatgaatgaatattaaaaacaatttctattatctctgaactatgagagatatggagattgtaacaaagaatgaaatccttaaaagaaaaaaagataattcaaattttcttgttcactacttaaaaaccattaaaagccatttttgacctaataattccatcaacccatgtatttcatatgtaaatgttcaatgaaacaggacttgccatgccatggataaagttttaaagacggtaataaaaatcttttcagggttattatttcatttaaacactactgatgtttatccagccaacaaaaaagtataatagcacaaagactgccttctgaatactccctagaggccaatcagccaggtgtgagaattctgaggttagggaaactctttgaaacagagttcaagaagagctacttagaaataaagaaacaaattcagatcatgatagccataaagcagaacctgcagaagggagcatcaaaaaaccaagggcagttttgcatatttaccaatttaatctactatttcaaaaaagctgaagcactagtcttatagtagtgacctgcaaaaattatcgagccacatttagtcaacagcaaatatccaatggaaaatctaatgcaatttttatatggatgctactggaatcttatatccaaaaactgaagaaggccaaccgaaaccccaaactacaattttattctttctgatcttatgttagttcctgaaatctgttatgaggaaaaatattcctataggataaaaacaatagtgggggctaatatatatggaaaatactacactaaaaagtttgcatacattatttcctttggttttcacaatcatcttaaataatacccggcttgactgtaggaatcttaacagaccccaaaggccgcagctcatttccaaatgcctggtcagaattttcctttttgtaagtttgtatacttttttgctggcttaatttctctttcctcaggtatactccaacacaatacactattaagcctaactactggtaaggtagagtcaaattctgttacaaaaagttccatatgacccctctacgctacatgacatggtagcaaacgaaaccatgacaggcagctgtgacgaaaatagctatacatttataatttaaagtaatattcctggctagaatttattggaaaggaaatatcaaatattggagctagaagagactttagggacactaatcaaaacaaaattttattgaacataaataagatgcatttttactgtaaactttccagtcattattgttgttcttaaagtttagcaagtttgggaagagaagctggaactcttggttttacatcaaaaccaagatcattaattttcctacagtatactaggattccttctattttatatttttgtgtaacccaaattactctattaaatagtagaaatttagagctagacaaaatttctaatccatccatttatttttacaggcaagaaaacaaaggcccagtgtgtcaagtagttttatattttggttgcatacagttggttaccaaaagagttaggactaaaacccaggacttcattcacatccagtgcttttcagcaaaacaaaaaagtcaatgcttatcagtaagaattttaacaggccaggcacagtggctcatgcccataatcctggcactttcagaagccaagatgggaggatcgcttgaggccaggagtttaagacccacctgggcaacacagcaagaccccatctctacaaaaaaattaaaaattagcaggcatggttgcatacacctgtagttccagctactagggaggctgtggcaggaggatgtcctgagcccaggagttcaaggttgcagtgcgctatgatcgcactccaacctgggtgacagagtgagaccctgtctcaataattttttttaaaaaattataataacagttatcacttatcaagcacctattatgagcctagcactactatattaaggattctatgtaattatctcaaatcctcccaacaacattaaaagtccagatctatctgcctccaaagccagctgtaccttctcttccatcatactgctttcataatcccaaggagaaatccaggttggtggggcaagtgggggacaggatggttgttttgtttctttttgttactactgaagttatccacatagagttacttcatttttgtgaaggacttaaaaatattaggttatgtacatgaaaaacacttttacttataaaaaagaaaaggcttccactgcatctttatgaaaacataaactaaaaaagttgtgaagactcacttatataagcaatcaaagactaattccttcctaaggaatgtgatttcaacacaaggctttcatttgacaacttggtttgttacagaacaaagacgtacatgtacacacacacacacacacacacacacacacacacacacacacacacataagactgaaaggaaatgtgccaaaaatgttaaaagccactactccccgacaactcataaccacagtgacctccttcaagaaatgagcacataacccaggatccagacaatcaagtttgccatccccctgactcctggctaccgtgatacattaagggatgaaaaactgacataaggaggaacacagagtcacctctgaaatttaccatataactggtgagaaggagtctatcttcctttcagacagtgagccgtgatgacgttgccctgaggctataagcacacaacagaagcctgcttgagaatgaagccatggcaggtggaaacagagccagcccacacagcagaagaagacccttgacatcatcatcagggttctagatccacgcatgcctgagatcagtccatcttggactcccatttacttaatctaacatatccactgtcttttaattttttgcttgactgcttgagttggatttgtgctgcttaaatttttaatagtactgactagtctcagagagaagccctcagttaaaaaataacactacactgcaaaatttgaaacattttaaaattaggtcaattaatcattttgtctatctaaaatatacttttaaattactgtaacaaaacttttaaaattaaactagtaatacatttagtgttcctaaataaggttattctaaatctttatgtattagcaataattgcacttatttaccacatacaacatgatattttgaagtatatacacattgtagaatagttaaatctagctaacaaatgcattacctcacatagttatcatttttgtggtgagaacacttaatatccactatatctgcatttttcaagaatacaatatacatggccggatgcggtggctcacgcctgtaatcccagcactttgggaggccgaggcggatggatcacgaggtcagaagatcgagaccatcctggctaacacagtgaaaccctgtctctactaaaaaatacaaaaaattagccgggcgtggtggcaggcacctgtagtcccagctactcaggaggctgaggcaggagaacggcgtgaacctgggaggtggagcttgtagtgagctgagatcgcaccactgcactccagcctgggtgacagagcaagactccatctcaaaaaaaaaaaacaaacaaaaaagaatataatatacattaactgtagtcatcatgctgtacaataactgcatttttaaatagtattagagtgttacattgcctgatattttgtttgtattaacatttttctaatggtagaacataccacaactttactcccttggcttttcaaacttctgccataccactcaccaactataggttatgttaggtgggcagagatttcttcattcacactcccgggatacataaatagaagaggaagttctaaaaccgtgatgattctgccttctccaaattcacagagaacatcacaaccatcacagagaaattccctcttttttcctcttctgttcctcagtaattcttccttccctctgctcatccctcatgctcaccttccctctggaccaactgggagtttgcctctcctcctttcaaagattaaccccatcacctatgttctcatctcctcccaaccttcactccatcttattctttctctgccagctatagtatttcctaccacactagcacgttcccctctgccatcacatatacaaaaattttctctaacttaaaaaaaatatttcacttaaccaagctgctcactttattgctctcctacttttcactgacagatttttcaaatgaatggtttaaatctggtatttaagcatcactcttcccttattccccaaaagtctagcttcctccctcccctcaaatccctgaaactgaattcatgatatttcttttattgtcaaatccaatggcccctttaatttcatttcctcatgcacaccgctgtatgtggcgttatttcactatcctcttgtaaaatcttgcccattggttcaatgacattataatccattttagctctcttgctgttggacttctctaaagaggtctccttttcctctcattccctgttagtaaagtgtgtgtttctcatattcattcttcagtccattcttcaatgttcattttccatatgctttctctgaaaaattatatctatcattaaaactgtgttgttctccaatataaggcaaaattacaacacacatacaaaagggtgaataaccattttccttcccaaattaggactactcccaaattttctgaaaatggcatcacttgtcttccctaaaaccatggcatgcacacacacactcctcagcatgcttcctattttctattgcctagaacacccttcttcccttctcacccaaaaaaattcctatcagtctcaaatgccccttcctctgtgaagcctttcctgccacacacccatcacccaatgaacatgacttcctagttctcccttctatagaaccatggcactaagtagatacctttactatagcactttttaaatgattttaggttgctatgtttttcatctcacccaataactatgtccaggtgcaaggagcacgttttattctttttgtttctttagttgctataacatgataggcatgtacttggtaagtatttattaggggaaaaaaaacacttgaaaggtcccagttcagaatgtcagaagcataatcaagacacttcatatacctgcagtgctttgcaagcatcaaagttgaaagtgctagctttgtgaataccaaaagcattaactgactacaccagtcatttagcattttggtttcctgccacaaatatacttccatctttacatgcatatgtgtcttatcttcttaaatgggtaagtactttcagactacaacttttaatgttaagtacattgtattatctagtgtgattccttgtaccttagtagggtctcaataaatatcacatagctatttgatgtgtctcattgttaggagttctaaaactatctgagagatctgtcattaacttattgttttaaattaaatcagtttttcaaaattactcattaaggaaaatatgcatacatggaactcaaataccttcaaatccatgatccaaataatatattaacttttaaaaagaaaaggcaagagtgggttctttcagtggtagtaatgcatctttccttgcaaatatggatctcaaatatggattacatatggccattaaaaagcaatttccctataattcataacgtaaaaactgattcaggcaatatcatcaatggaggtaaaaggctattgggaacaatcatcccacagatttataaatgagaaaaatagggagcagttccaagatggccgaataggaaaagctacagtctacagatcccagtgtgagcgacacagaagacgggtgatttctgcatttccaaatgaggtaccaggttcatctcaatggggattgtcggacagtgggtgcaggacagggggtgcagtgcaccaagcgtgagccaaagcagggtgaggcatcacctcacccgggaagcacaaggcgtcagggaattccctttcctagccaagtgaaggggtgacaaacagcacctggaaaatcgggtcactcccaccctaatactgcgcttttccaacggacttagcaaacggcacaccaggagattatatcccatgcctggctcggagggtcctatgcccacagagcctcgctcgttgctagcacagcagtctgagatcaaactgcaacgcggcagcaaggctgagggaggggcgcccgccattgctgaggcttgagtaggtaaacaaagcagccgggaagctcgaactgggtggagcccaccacaactaaaggagacctgcctgcctctgtagactccacctctgggggcaaggcatagccaaacaaaaggcagcagagacctctgcagacttaaatgtccctgtctgacagcttggaagacagtagtggttctcccagcacagagcttgagatctgagaacagacagactgcctcctcaagtgggtccctgacccccgagtagcctaactgggaggcaacccccagtaggggcagactgacacctcacacggccgggcacccctctgagacgaaacttccagaggaacaatcaggcagcaacatttgctgttcaccaatatttgctgttctgcagcctctgctaatgatacccaggcaaacagtgtctgaagtggacctccagcaaactccaacagacctgcagctgagggtcctgactgttagaaggaaaactaacaaatagaaagacatccacaccaaaaacccatctgtacgtcaccatcatcaaagaccaaaggcagataaaaccacaaagataggaaaaaaagagcagaaaaactgaaaattctaaaaatcagagcacctctcctcctccaaaggaacgcagctcctcaccaggaacggaacaaagctggaaggaggatgactttgacgagttgagagcagaaggcttcagacaatcaaacttctcagagctaaaggaggaagttggaacccaacacaaagaagttaaaaaccttgaaaaaagattagatgaatggctaactagaataaccaatgcagagaagtccttaaaggacctgatggagctgaaaaccatggcacgagaactacgtgacgaatgcacaagcttcagtagccgattcgatcaactggaagaaagggtatcagtgatggaagatcaaatgaatgaaatgaagcgagaagagaagtttagagaaaaaagaataaaaagaaatgaacaaagcttccaagaaatatgggactatgtgaaaagaccaaatctacgtctgattggtgcacctgaaagtgacagggagaatggaaccaagttggaaaacactctacaggatattatccaggagaacttccccaatccagcaaggcaggccaacattcagattcaggaaatacagaaaacgccacaaagatactcctcaagaagagcaactccaagacacataattgtcagattcgccaaagttgaaatgaagggaaaaatgttaagggcagccagagagaaaggtcgggttacccacaaaagggaagcccatcagactaacagctgatctctcggcagaaactctgtaagccagaagagtgtgggggccaatattcaacatacttaaagaaaagaattttcaatccagaatttcacatccagccaaactaagcttcgtaagtgaaggagaaataaaatactttacagacaagtaaatgctgagagattttgtcaccaccaggtctgccctaaaagagctcctgaaggaggcgctaaacatggaaaggaacaaccagtaccagccactgcaaaaacatgccaaattgtaaagaccatcaatgctaggaagaaactgtatcaactaacgagcaaaataaccagctaacatcataatgacaggatcaaattcacacacaacaatattaaccttaaatgtaaatgggctaaatgctccaattaaaagacacagactggcaaattggataaacagtcaagacccatcagtgtgctgtattcaggaaacccatctcatgtgcggagacacacataggctcaaaataaagggatggaggaagatctaccaagcaaatggaaaacaaaaaaaaggcaagggctgcaatcctagtctctgataaaacagactttaaaccaataaagatcaaaagagacaaacaaggccattacataatggtaaagggatcaattcaacaagaagagctaactatcctaaatatatatgcacccaatacaggagcacccacattcataaagcaagaccttagagacctacaaagagacttagactcccacacaataataatgggagagtttaacaccccactgtcaacattagacagatcaacaagacagaaagttaacaaggatatccaggaattaaactcagcgctgcaccaagcagacctaatagacatctagagaactctccaccccaaatcaacagattatacattcttctcagcaccacactacacttattccaaaattgaccacatacttggaagtaaagcactcctcagcaaatgtaaaagaacagaaattataacaaactgtttctcagaccacagtgcaaccaaactagaactcaggattaagaaactcactcaaaatcacacaactacatggaaactgaacaacctgctcctgaatgactactgggtacataacgaaatgaaggcagaaataaagatgttctttgaaaccaagagaacaaagacacaacataccagaatctctgggacacattcaaagcagcgtgtagagggaaatttatagcactaaatgcccacaagagaaagcaggaaagatccaaaactgacatcacaattaaaagaactagagaagcaagagcaaacacattcaaaagctagcagaaggcaacaaaataactaagatgagagcagaactgaaggagatagagacataaaaaacccttcaaaaaatcagtgaatccaggagatggttttttgaaaagatcaacaaaattgttagaccactagcaagactaataaagaagaaaagagagaagaatcaaatagacacaataaaacatgataaaggagatatcaccaccgatctcacagaaatacaaactactatcagagaatactataaacacctctatgcaaataaactagaaaatctagaagaaacggataaattcctcgacacatacactcccccaagactaaaccaggaagaagttgaatctctgaaaggaccaataacaggctctgaaattgaggcaataattaatagcttaccaaccaaaaaaagtccaggaccagacggattcacagccgaattctaccagaggtacaaggaagagctggcaccatttcttctgaaactatcccaatcaatagaaaaagagggaatcctccctaactcattttatgaggccagcatcatcctgataccaaagcctggcagagacacaacaaaaaaaagagaattttagaccaacatccctgatgaacatcgatgcaaaaatcctcaataaaatactggcaaaccaaatccagcagcacattaaaaagcttatccaccatgatcaagtgggcttcatccctgggatgcaaggctggttcaacatatgcaaatcaataaagtaatccagcatataaacagaacaacgacaaaaaccatgattatctcaatagatgcagaaaaggcctttgataaaattcaacagcccttcatgctaaaaactctcaataaattaggtattgatgggacgtatctcaaaataataagagctatttatgagaaacccacagccaatatcatactgaatgggcaaaaactggaagcattccctttgaaaactggcacaagacagggatgccctctctcaccactcctattcaacatagtgttggaagttctagccggggcaatcaggcaggagaaagaaataaagggtattcagttaggaaaagaggaagtcaaattgtccctatttgcagatgacatgattgtatatctagaaaaccccatggtctcagcccaaaacctccttaagctgataagtaacttcagcaaagtctcaggatacaaaatccatgtgccaaaatcacaagcattcttatataccaataatagacaaacagccaaattatgagtgaactcccattcacgattgcttcaaagagaataaaatacctaggaatccaacttacaagggatgtgaaggacctccttcaaggagaactacaaaccactgctcaacgaaataagagagaatacaaacaaatggaagaacattccatgctcatggataggaagaatcaatattgtgaaaatggccatactgcccaaggtaatttatagattcaatgccatccccatcaagctaccaatgactttctttacagaattggaaaaaactactttaaagtacatatggaaccaaaaaagagcctgcattgccaagtcaatcctaagccaaaagaaaaaagctggaggcatcatactacctgtcttcaaattatactacaaggctacagtaaccaaaacagcatggtactggtaccaaaacagagatacagaccaatggaacagaacagagccctcagaaataataccacacgtctacaaccatctgatctttgacaaacctgacaaaaacaagcaatggggaaaggattccctatttaataaatggtgctgggaaaactggctaaccatatgtagaaagctgaaactggatcccttccttacatcttatacaaaaattaattcaagatggattaaagacttaaatgttagacctaaaaccataaaaaccctagaagaaaacctgggcaataccattcaggacataggcacgggcaaggacttcatgtctaaaacaccaaaagcaatggcaacaaaagccaaaattaacaaatgggatctaattaaactaaagagcttctgcacagcaaaagaaactaccatcagagtgaacagccaacctacagaatggcagaaaatttttgcaatctactcatctgacaaagggttaatatccagaatctacaaagaactcaaacaaatttacaagaaaaaaacaaacaaccccatcaacaagtgggtgaaggatatgaacagacacttctcaaaagaagacatttatgcagccaagagacacatgaaaaaatgctcatcatcactggccatcagagaaatgcaaatcaaaatcacaatgtgataccatctcacaccagttagaatggcgatcattaaaaagtcaggaaacaacaggtgctggagaggaagtggagaaataacacttttacactgttggtggcactgtaaactggttcaaccattgtggaagacagtgtggcgattcctcagggatctagaactagaaataccatttgacccagccatcccattagtgggtacatacccaaaggattataaatcatgctgctataaagacacatgcacacgtatgtttattgcgacactattcacaatagcaaagacctggaaccaacccaaatgtccaacaatgatagattggattaagaaaatgtggcatatatataccatggaatactatgcagccataaaaatgatgagttcatgtcctttgtagggacatggatgaagctggaaaccatcattctcagcaaactatcgcaagcacaaaaaaccaaacatcgcatgttctcactcataggtggcataggtgggaactgaacagtgagaacacttggacataggaagggggacatcacacaccggggcctgttgtggggtggggggaggggggagggatagcattaggagatatatctaatgtaaatgacgagttaatgggtgcagcacaccaacatggcacatgtatacatatgtaacaaacctgcacgttgtgcacatgtaccctagaacttaaagtataaaaaaaaagagaaaaatatatctttacagtgaagagatccagcagtcaccttcttgattaagtatgtatcatgtatgcagtattctcaccaaaaaaggttcaacctgaatctaacaatgaggaaaagctggacaaattcagaatgtgggatattcacaaaacaagtgatataaaaccctcaaaaaaattagaatcaaaattgggttcagtgtatattgcttgggtgatgggtgtaccaaaatctcgtaagtcaccactaaagagcttacttgtgtaaccaaataccacctgttccccaaacgcctatggaaataaaaaaaaaagaaaaaaagtacataataaaaaaaaaattagaatcagtgtcatagaaagcaatataacgttagatttttattttctagaataaaacagtctcaggtgacataaccaaatatagtgtaaggaccctggattttaaaaaatttataaacttttatggactaccatattaggcataattatgaaatatgatttttcttagttgtgttaatgatactgtgattatgaatagcctaaccttggaaattcatgctagaagaacttagagataaagtgatatctacagcttccattcaaatgattcaattaaaaattttaaagagtatatggactgggcacagtgactcacacctgtattcccagcatttttggaggccaaggcaggaggatcacttgagcccaggaggtcaagattagcctggacaatctagtgagaccccaactcttaaaaattaaaacattagccaggtggtggtgcacacctgtagtcccagctacctgggaggctcattcaggaggattgcttgagcccaggagttagaggctgcaccaagctttgatccactccagcctaagcaacagagtgagatcaggtcacaaaataaaatttttaaatatatgtaaagcaaatgtgacaaaatgttaaggatatttttgtgctcatgaacacaatacattcagcttttctatatatttttaaatcttcaaaataaaaagttaaaagggaaagtaatattctcttctttccaatcactgtaaacattagtaaattgatagaggggcttatcttgaagagatttagtttagattaagtatagaaccctattatatctaacatttattttaaatacttttacaatataaataaactaacctgagaatataagctataaaaacataactttacaatctaagaataaaacaaatggaaaaaattcttcctcattctacatataaaattttgtagttcctagaaataattattggtcagaaaactcttcttaccaatgtttaatagaacacatattcatgaatattcttgagcttacatcttccaatgatacacagtcatcccatgatcctaacaattcatgacctttggaatcacaaatcttatttttactctgcatcaaatgttctcccccaaccccactacctgcctctgttgccaggctgccatcttatcagcctcccaaattcaacttaactgtcactccattagctatctatcactgcataacagattaccacaaaacttagcactttaaaataacaataagcctttatgatctcacagtttctgttgggtcaggaattcaagaccagtgatgcataaggcatagcaaaactacgatcagcactcctgttcaaacaaaggacaattaggaggtgtgtgggagtcactgacccatagcaattctgaaatccagcaggtgttttgaggcaacactttggatctttctaagatcttaaaggactttaaagtcacaacttcaaaacacctggatatttctaaggtcttaaaggacattaaagtcacatcttcagcttgatctgtagatcaagttttcccatgagggtcctagattggatcttttctagaacccatttcttaattttagtatcaatgatcatacgaagaggctgggaattttcaagccctacagttccctgctcttttttctttaatagtatttcattttgcttatctctctccttttacattttatacataagtagcaagaagaaaccaggtagcttcttcaacattctgataagaaatctccttagctagatcacttcattcataggttacatttttctattttccatcttattgcacatgacagagttgctaaactttctgccaccacagaacaaggatcccctttcctcgtgtttccgttaatatttttctcactttcctttaagccctcgagcaaagccttctcaaaggcttctacttctactcaaacttctactaacagtcaactcaaggctctacatgctttcactaatgtttcaaaatccttcaagcttgtagccagttccaaattcaaaagacagtactacatttttgttacaacaaaacaaaaccactctgataccaaaatctatattgcttttttttttttttggcaggatctcattctgtcacttttagcacaatcttagctcactgcaacccccacctcccaggctcaagaacttagagatagcgatcctcccacctcagtctcccaagtagctgggaccacaggtgtgcaccaccacacccagctagttgttgttgttgttgttgttgtagagatgaggtttcaccatcttgcccaggctgatctcgaactcctgagctcaagtgatccacccacctcagcctcccaaagtgctgggattacagctgtgtgccaccgtgccctgctcaaaatctctattatctattgctataattacccccaaaattagtattttcaatacaataaggttttattatacagtttctgtgggaaaggagtgacttagctaggtggttctgcaccagggtctgtcatgaaattgcagacaatatgttagccagggatgtagtcatcagaagaccctacttggtttctactatggcttgctcatatgatggaaaagttcatgatagtttttggcttataattccatttctggtgggaatagcagcttaatggccattccacctttagatgagtcaagatggtgtttttctaggtcacatagcagtttgaattgctttttgaactagcatatcaacagcttatcttccacattttaaatcacaacatttgagtaattcatagtttcactaaaacatgtaaaaactcagtagtgatgatcaaaagctgagggtatctcaggcaaaaggggatagctggtcatgttccactagatccctaaaccaaagacacagggtcactaacataacatggtaggcaccaccctactgtttctgacactacctttagttctactactgcaactattatttatattctgagaaaaatttttaaatagattacataaagttaaaattaaatgatatcaagaaaaggcatctaaaatgtaggatacatgactagtaaactagaaaagataagaaaagcatacaggcaaagtaaaacaacacaaaggcagaacaaaaatccaccgtagaaagaaatagtttctatcaagagaatagaaatctgaatcagtgaaacagaagacaaactacaaacattcatggaaaattaagggaaaaaagataaaacataaaacttataaagggagaaagggcagataaggaggataggctacaaatgtctaatcaaagataataaggtgctatgctaccatggtggattacaggaggccataaattccttatcattcttcctatgaggaaatggactccatttcccctcctcttgaatctgagctggtgaatcttgtgacttgttgcacgagtaaaatgtattggaacaatgatctgccacttctgcaactagtctttagaagaactggtggcttccattcttagaagttagtaacatgctctaaagtaatccaggatgacctgctagagagaggcaacatggaggcgaactgaggcactctgagccaacattcaagcaccaaggacccaaatacaggaataaaccattctaccatcttttagttcagtgcagctacccttctaagtgcacccataggaatgactctaggtgacatctccaagagaaccatggactcaaaccacagaatcatgaaaaaaagataaattgttgttttaaggcaataaacattggggtagtccattacacagcattggtaactgatgtagctataatgatctacaacaacacgacactgccaaaatatatgaataatatctgtagtctgtagtataagatacttgtatttcaagaccctgctagaaaataatattttaaactgtttgaggccaggcgtggtggctcacgcctgtaatcccagcactttgggaaactgaggtgggcgaatcacttgaggtcaggagtttgtgaccagcctggccaacatggtgaaaccccatctctactaaacatgcaaaaattagccaggcgtggtggcacatgcctgtagtcccagctactgaggaggctgagacaggagaattgcttaacctagaaggcagaggttgcagtgagccaagatcgtgccactgcactccagatgggtgatagagtgagactctgtctcaaataaataaataagcaaacaaacaaacagtctgaaaacccagcttgtttcaaaaacctggctgaaagtaatagctttttaatttcttaaactatcttccattatttacttacttgaaaaaatattctgaattctatccatgaattaactcaggcatggaagataaatgctaaattgtaatattgcatcttcaaattttattgacatctattttaagatgtttaaagaagctgtcttaacaatcccacttaggtaagtatattctcattctttgcttcattcattcattcaacagtttttgaggacttactatgcacaaggaaactacgaagtaggattgagagcagattaaaactggatcactcccctaactttctagaaagtcaacccctgcttagtctgcacttccacagcactttatacaaatctcgattttgcagaaataataacagcagccaacatttatggaacacttactatgtacctggcaaaattctaagtcattattacataatttaactcagttaatcctcacaataaccttcatgaggtagataggtactattacccccattttatcaatgaggaaactgactcatcttgaagtcttttttccccactagactctagactccatgagggcaagtgtttcttcatctcagtatctcacacatcccagtttctggcacatatttcgctagaagtaaataaagaaattagtttgtccaaaaactagatacaaacatgctcatttacaagaacaattttttactcctcaaaagtataaggcaataacacttttttggactaagaaaaaatggcttggtgttgaataaatatagtatctctaactggtaagaaaacttaacataaagtttacccaacaattgatgaaaacaattaagacttaaattttttaaacaagtctaatttgataattttattcagcaatatgttatgcagaagtccataaaaatcacaatgacaggcgccaagatggccaaatagaaatcgctgtggccagaggctcccaccaagaacaaaaaaggccagtgaatcctgcaccagcaactttgagatatccaggttctctccatgggactgactaggcagttggcgcgacctatggagagtgaggaaaagaagggtgatgcaatggcccacatgggagccacaatggagaaaggggagctcccaccctcagccaagggaggcagtgagtgactgtgctaccctgcccaggaaaccatgttttttccacagatctgtgcaacccgtgggtcaggtcaggatatcaccctcatgagccgatgccaccagggccttgcgtgccaagcgcagagctgtgcagatgtttggcggtcactcaactggagaatgcctaagactaccgaattcccagggaaaggggccaccgtcatcactgcggctgcctgctgtccaagacgactaagctccccagggaagggagagcagccatcactgcagctgcctgctgcctaagatgactgagctccggaggggcagcagccagcactgtagctccagttggccgttttttccctgctggtgccagggagactggacggtttggacccaggagaaattctccacagcaaggacagcggctgtggcagactgtggccagactgcctcttcaggccagatcctgacccatccctcctcactgggcagggcctccctgcaggaattttagcaactccagcaggggtttaggaatggaactctgctctccctgggactcagcccctgcggggagaggcagtagctgtctctgtggatcagcagacttaagtctttctccctgctggctctgaggaatccaggtagtccagaggagtgtgacaatccccagcacagtgcatcccctccgccaagggacagctggacgatttcattaagcaggtcctggatcttgtgcctcctgactgagagagacccccccaacaggggtcgccagacaccttatataggagcattcctgctggcatcaggtcggtgcccctctgggacagaaatcacagaggaaggagtaggcagccatctttgctgttctgcagccccctctggtgacatctccaggtgtgggagggatccaaacgcacagggtctggaacgggcccccagcaaactgcagcagccctacgggagaggggcctgtttttttgttttgttttgagatggggtcttgctctgtcacccaggctggagtgcagtggcacgatcttggctcactgcaacctccgcctcccaggttcgagcaattctcctgcctcagcctcctgagtagctgggactacaggcgcatgccaccacgcccagctaattttttgtattttttagtagagacagggtttcactgtgttagccaggatggtctcgatctcctgatctcatgatccacctgcctcggcctcccaaagtgctgggattacaggcgtaagccaccacacccagccctaactgttaaaagagaaactaacagaaagcaacaacagcagcatcaacaaaaaagtccccacaaaaattccatctaaaggtcagcagcctcaaagatcgaagctggataaacccatgaagataagaaagaatcaacgaaaaaaacattgagaaccccaaaagccagactgcctcttctcctccaaatgatcacaacatctctccagcaagggcactcaactagacgaacgcttagatgaactgacagaagtaggcttcagaaggtgggtaataacaaacttcacagagctgaaggagcatgttcaaacccaatgcaaagaagctatgaaccatgataaaacatcacaggagctgttaaccagaataaccagtttagagagaaacataatgacccaatagaactgaaaaacacaacacgagaacttcacaatggaaccacaagtataaatagccaaagagaccaagtggaggaaagaatttcagagcttgaagactatcttcccaagattagagaaaaaggaatgaaaaggaacaaagaaaacctctgagaactatgggattatgtaagaagaccaaatctatgactgattagggtacctgaaagagatggggaaaatggaaccaagttggaatatatacttcaggatatcatccaggagaacttccccaacctagtaagacagaccaacattcaaatccaggaaatccagagaaccccagtaagatactccatgagaagatcaaccccaagacacataatcatcagattctccaaggtcaaaactcaaagaaaaaaggttaaaagcagccagagagaaaggccaggtcacctacaagggaagcccatcagacaaacagcagacttctcagcagaaaccctacaagctaaaagagattggggaccaatatacaacattaagaaaaaaatttccaacccagaatttcatgtccagccaaactaagcttcataggcttagtttggaaaaataaaatccttttcacaaaagcaaatgctgagagaattcaccactatcaggcctgctttgcaagagctcctaaagggagactaaatatgaaaaggaaaaaccattaccagccactgcaaaaatacactgaaatacaaagaccaatgacactatgaagcagctacatcaacacgtctgcaaaaccaccagctaacatcatgatgacagaatcaaattcacaaataacaatattaaccttaaatgtaaatgggccaaatgtcccaattaaaagacacagaatggctagctgcataaacaatcaagacccatcagtgtgctgtattcaagagacccatctcatgggcaaagacacacataagctcaaaacaaaggagtggaggaaaatttaccaagcaaatggaaagcagtaaaaagcagaggttgcaatcctagtttctgacaaaacagactttaaaccaacaaagatcaaaaaagacaaagaagggcattacataatggtaaaaggattaaatcaacaagagctaaccatcctaaatatatatgcatccaatataggagcatcaagattcataaaacaagttcttagagacctacaaagagacaaagactcccatataataacagtgggagactttaacaccccaccatcaatattagatagatcatcaagacagaaaattaacaaggatattcaggacctgaactcagctctggatcaactggacctgatagatatctgtagaactctccacccaaagacaacagaatatacattcttcttggtgccacatggcacatactctaaaatcaatcacgtaattggaagtaaaacacttctaagcaaatgcaggaaaactgaaatcctaacagtctctcagacaacagcacaatcaaatcagaactcaagattaagaaactcactcaaaaccacacaactacatggaaattgaataacttgctcctgaatgactcctgggtaaataatgaaattaaggcagaaatcaagaagttccttgaaatcaatgaaaacaaagagacaatgtaccagaatctctgggatgtagctaaagcagtgttaagagggaaatttatagcactaaatgaccacatcaaaatactagaaagatctcaagttgacaacctaacatcacaactaaaagaactagagaaccaagagcaaacaaaccacaaagctagcagaagacaagaagtaaccaagatcagagcagagctgaaggagagagagacactaaaaacccttcaaaaaaaaaaaaactaatccaggagctggtttttttaaaaaattaataaaatagctagaacgccagctagattaataaagaagaaaagagagaagaatcaaatagattcaataaaaaatgataaaggggacatcaccactgaccccacagaaacacaaactaccatcagagaatactataaacccctctatgcaaataaactagaaaatctagaagaaatggataaattcctggacacatacaccctcccaagactgaactaggaagaagctgaatccaggaatagaccaatacaggttctgaaattgaggcagtaataaatggcatactaaccaaaaaaagcccaggaccagatggatttacagctgaattctaccagaggtacaaagaggagctagtatcacttcttctgaaactattcccaacaattgaaaaggagggacttctccctaacttattttatgaggccagcaacaacctgacaccaaaacccaggagagatgaaacaaaaaaagaaaacttcagccaatatccctgatgaacattaatgcaaaaatcctcaataaaacgctggcaaagtgaatccagcagcacatcaaaaagcttactcaccacgatcaagtcagcttcattcccaggatgcaatgctggttcaacatatgcaaattaataaacataattcattacatcaacagaactaaaaacaaaaccacatgattatctcaaaagactcagaaaaggcctttaataaaattcaacatcccttaatgttaaaaactctcaataaattaggtatttatggaacatagctcaaatacaagccatttatgataaaatcacagccagtatcttactgaatgggcaaaagctggaaacatttcccttgaaaactggcacaagacaaggatgccctctcccactattcctatttaacatagtattggaagttctggccaaggcaatcatgcgagagaaattaagtgtattcaaacaggaagagaggaagtcaaactgtcttgtttgcagatgacatgaccctatatctggaaaatcccatcatctcagcccaaaagcttcttaagctaataagcaacttcagcaaagtctcaggatataaaatcaatgtgtaaaaatcacaagcattcctatacaccaacaacagacaagcagagagccaaatcatgaatgaactcccattcataattgctacaaagagaacaaaatacataggaatagagctaacaagggaagtgaaggaccttttcaaggagaactcaaggaaatcagagaggacacaaacaaatggaaaaacatcccatgctcatggataagaagaatcaatatcgtgaaaatggtcatactgcctaaaataatttatagattcaatactattcccattgaactaccattgactttcctcacataataagaaaaaactactttaaaattcatatggaaccaaaaaagagcctgaatagccaagacaaatcctaagcaaaaagaacaaagctggaggcatcacactacctgacttcaaactatactacatggctacagaaaccataacagcatggtactggtaccaaaacagacacatagaccaacggaataaaatagaaatctcagatataagaccacaggtctataaccatctgatctttgacaaacctgacaaaaacaagcaatggggaaaggattccctatttaacaaatggtgctaggagaactggctagccatatgcagaaaattgaaactgggccccttccttacatcatatacaaaaattaactcaatacagatttaaagacttaaacataaaacccaaaactataaaaactctagaagaaaatctaggcaattccattcaggacacaggcatgggcaaacttttcatgatgaaaacatcaaaaccaattgcaacaaaagcaaaaattgacgactgggatctaattaaactaaagagcttctgcacagcaaaagaaactatcatcagagtgaacagacaatgtacagggagaaaatttttgcaatctatccatctgacaaagggctaatattcagaatctacaaagaccttaaacaaattttcaagacaaaaaaaacttcattcgaaagtgggcaaagaacataaacagacacttttcaaaagaaggcatacatgcagccaacaaacatgaaaaaaaaaagctcaatatcactgatcattcaagaaattcaaatcaaaatcacaaggagataccacctcacaccagtcagaatggcaattattaaaatgtcaagaaacaacagatgctagtgaggctgtggagaaagaggaacacttttacaccattggtgggaaagcaaattagttcaaccattgtggaagatagtgtggctattcctcaaagacctagaaccagaaataccatttgacccagcaatcccattactgggtatatatccaaaggaatataaatcaatctatgataaagatacatgcaggtatgttcattgcagcactattcctgatagcaaagacatggaatcaacccaaatgcccatcaatgatagactgaataaagaaaatgtggtacatatacaccatggaatactatatagccataaaaaggaacaagatcacgtcctttgcaggagcatggatggagctggaagccattatcctcagcaaactaacacaggaacagaaaaccaaataccacatgttctcacttctaagtgggagctgaacaatgagaacacatggacacagggagtggaacaacacacactgtggcctgtcagggatgaggggagaaagagcatcaggataaatagctaatgcatgttgggcttaatacctagatgatgggttgacaggtgcagcaaaccaccatggcacacgtttacctatgtaacaaacctgcatgtcctgcacatgaatcccagaacttaaaaaaatcacaatgacaactattcaaatctgcatcataaagtattttaaaaggagtcagtgacagaggaataagaaaataagggataataaccattaaaatatgtggctttaagacaatccaagtaactgtaacacctaatacttcaaactatgtaatttggatatttttggctgaccattatttgggttggtagaggtggagtcataagctgtaaaacctgtgactatccgtttcattgcacactgtaacttaaaaacaacaatgaaaacccttatataattgacttgttacattaaaaattcacaatcctcagattaccggctacaaacaggaatttggattctacaaggggaataaaactaattgaaataatttaccaaacgtaccccataattcattatcacttcaggataccaaaactatcttttttttaagaagggagcatagccaggtgcggtggctcacacctgtaaacccagcactttgggaggccaaggcaggcagaacacctgaagtcaagagttcgaggtcagcctagccaacatggcgaaaccccatctctactaaaaatacaaaaattagccaggtgttgtagcaggtgcctgtaatcccagctacttgggaggctgaggcaggagaatcacttgaacccgggagacaaaggttacactgagccaagatggcaccactgcactccatcctgggcgacagagtgagacttcatctcaaaaaagaaaaaaaaaagaaaggagcataaacctagtactcctaggaccagacaaaatggctacatttcagaataatacccgacaagagtaaattttagagaatgttggtatgtcaaattttcaatctgacctctagaaaggctactgtctctcctgggtatctgattgagaactgaagtacaaacattagttacatttgccaaaactttttgtagcagactgctggttgtctaacacaacatcaattaccaaacccctttactcttgccatctcccgctacagaaattgaaagccaaatattcaccttctaacagctaggagtggcacataacccagttctggaaaagtaagtctgatagcgagcttcggagaaagcttttgcattcctaatataagggacagtgtggctgacaccagccatctcccatttgactgccttgaacagagatgtaatgcccattactacagccatcttgaaaccttgaagcaacaagtatatgaaaagcaaacaagctaacggtgatgaaccagagatagcttcaatctctgatgattctatcctgatctgctaactataaccgcccacctatacccttaagtggaaaaaaagaaaatgtccttttttgttgttactgttggctaggttttctgttattttcagcagaatgccaaccttactaagcatgcaaagactatgatgtacaattcctttaatttaaaaaagttctagtaattgtacaaacaaaaagcaaacattctgatgccaagtaagtgtgacaacaaattaaacccgggacaaattaaattaaatgttaggaagtcctaaataacttctcttaacaatttttatataaattaataaaatacatgcatttcagaaattttacaaaatacaaaataatataaggaaggaaaaaactcaatacccagaaataaccacttattatattttggtatatttccatccaattcatttttatacatatatcaacatataaaactatgcttttatctttataaactggaatcctgtaggatgttttattaactaatacaggtagaaagtgataactcagtagtacataaaagcatgtaagactcaaaaataaaagtatctcttccaccattcccatacacacaggaccacatatacacaagacctcattctccattccacttctcataaacagccacttttaatatttttggcattgtggatgtttcttgatttatcacctattaaccacatcaaatgacttcttactataaagattgagaaattaagataccctctgccctttcttcccaatttttgttactttcattttcatttttagcttttctactggtttgtattccacattaaaaaaatacacttaagcctctatttcttgacccaggaattttagatggaaatgtcttagctcctaactgtgtaagataaggaaattagtattcttacacagcaagcatttttaatcataaagtttaaccaaagaattaaaatatgactatttggtcttacccaatcctgagtgagaggaaaaaaatgtatgtacgtacttgtcgctttagtactatttcatttaagaaaaagtgttgaaaaatataggagcagtatcataatgaagaccaaatctagaaagcaactattagaacttggaaatcctataatgaatttttgtaattactacagacaaacatgaatttttaaattaagaaagatgaagcctgaggaagagagtacaacatgaaggtcagttgacaggaaaggaatactgatcaactcctcttttacactggtcttctccaaagagaaatatcataatgaaaacattgatattgatagttagcaagtagcttatcactttgagttccggtcagcatcagtgatttttgatcaatgtaaaagcatctgaagaatgttttaaaaacaacaacaacaacaacaacaacaaaacttaaaagggcaagtatcccgactgtctatatagaagtaaacaatgggtgagttaaatactaaatattagtaaagttgatgtcaaactagtaatattctacagattattaaatagttatttactatttaatatgtcccatgcagtctgataagagctaatcacacattatgagcttggattcctatacccatataaagtaggcacttttatcatctccattttacagaccagaaatttaagacagattaaggattgtgcccacagacactaataaatggcaaagccaggatttggaattcagtcccatcctcttaaccattacactcaaatgacatatataggtacagctgacccttaataacatgggtttaactgaatgactccacttgtacctggatttgcttcttctgcctcagccactcctgagatagcaataccaaccctttctcttcctcctcagcctacttgacttgaagacatcaaggatgaagacctttatgatgatccacttccccttgatgaaaaataatacattttcttaataacattttttctcttacttcattgtaaaaatacagtacattatatataaaatgtgtgttaatggactgtttatgttatccgcgaggcttccagtcaacagcaagctattagtagttaagttgtgagggagtcaaaagtgatttgcgcatttttgaccgtgcaggtggtctgtgcccctaactctagtcttgtttcaagcatcagatgtactttgaaattgtagatggacaagaagtaagaatagattcactaagagcaagttaagtcaaactagtcacttttttcgagttccaggttcccatggcatggataaatctccaagacatagtaagtgattacggtatcatttatgtaatgtgaggcaaaacagaaagatgcaatgtttacacagaataaagtgtaaaagtctcattttcttaattatcccccttcctatccctgcctaatctcttcaatccgaatctcttgacaaggggataatactacctataatttggcattttcttctagttcttaagtacttcttaaaaattttagctttatattggcatgacatacttggcagtggttatttctgagaaagaatatggaagaaaggaatcacacgataccctatatatttactgcttggctcttttaaaggagaatatattacttagataatacaaaatgttttcatcataatgatgctcaaaggaaaaaggtgaagagtttgtaagtatgacctcaatggtctccttgaatgggaaaagtctgacatattaaactacttaacaactaaaaaattttacaaggcaaaaatataccgtaacattaaaaggtatattcaaactagaaaaatattcacaacaaaaaagattaatcaaataaaggtattctcaatacacaaaaagctcttaccaataaataagaacataaaatttatacatgtttaaggataggcctcatatttaaaacttaactaagaacaagaataataattcatttaagcaacgttaaacctcagtaacaaagaaatgtaaaataaaacagcaatacaatggcaaaaactagaaagagtaacacccagcaatggctacggtataagaaagtagaacccttcacatattagtgctaggaatgtaaactggtaacatctggacaataaactgactttataaatgatttatataatcaaaacataataaaagttcccttaaagagtaaaactgagaaaaagtggctacagcctttaatcgcaccgaaggcccctacagtgacagactatgagaagaggctaacagtctcactgtgctttttccctgcaccgatcacatctgcagtaacagattcacttctgggcactacgctgtaagagaaacattgacaaactgagctatttccacagtaagataccaatacagtcagccctccatatctgtgggtttcccatctgtggattcaaccaaccacagatcaaaaatattcaggaaaaagaaatcatctgtactgaacacttacagacttttttcttgtcattattccctaaacaggacagtgtaacaaccacttacatagaatctttacatggcatttgcagtggattaggtaatgtaagtaatttaaagatgatttaaagcatacaggagggtgtgtgcaggttgtatgcaaatactacaccattttatgtaagggatttgagcatcagcagattttgctatctccaggaagtcctggaaccaaccccccgtggatactgggggacaactgtaccgtgtatgagagggctgcaaaccgtgtcttataataattataaacataataaagaattgagagcactttgcttagaaagagggattttagggaagacaggatagcaatctcgaaaaatccgaaggcctataaactggaaaacagaacttgttttatattgctcaggagggcaaacaaagaccaccagtgctcagagctgttaaataatgaaacagatacagtgcaactttagttgcccacaatatctaagataagtgatccattagaaacacagtagaaaagattcttcttataggcttagaaagttaggtttcatgaaatcagaggtactttaccgttctaagagtaaagcaaaaattacccttaaaatacgcattaatcttccaaaccataaaaactacaatattcccaatcttttattctacttacctaatttagataccttatttactagtccattctgggacaatcagggtacaacccactatctttgtcaggaataaccattcagtcaaatctaccaattcctaccctgtcagttctgttttgctacacaaaaatttgacagatatacaacatggttctagaattccagtgctgcccttaccgaaactctctcctgaacattaggctgctttcataactgtgatctagtctgtgtttcctaccttgcctcagctgtcccagttctagttccttgccctaatatctgtgacatactgttatctgaacttctagaatcattattttcttccccatttttgtatcacatactgattaagagactaccgtgctcaaaataatggtgaactgtatttcagaaggaaaattacaaactgtacaaaatataaagttgtattagacacagtgctgtcaaggaggttacaatggaaaggagaaataacagatctatgtaataacaaggcaatagaaagtcataaggaggtcaagacaggaaattgttgcaatattatacagacaaaagaaatcattctaattttgtaagaccatgatctgggtaaataatttggctttgaaggacacaggagatttttcacttaaaaagacagaggggaaaaaacatgccaagccgaaaaactagcataaccaaaaacacagaaaattagtggtaggtgcagggctatcacacatcaaaaggtaatgtgattgattataaaatgcgaacacaaactaaagaaagtttctctatgtcaaagggtatagaaactatggaaacagttactcaaagagagaaaacacaagttcaagaggtacagcttctctgcattctccactgggaagtagagcagtgaataatattactcacacagtgtgaggattccacaaggtggaagatactcccccttttccatactcagaggattttaaatctttccacccaaaacttctgagcccctcccccccaacaagatacaaaatattttttgaagaaattcaatctattcctaaacgtcaagaaagaaacaaaatctgaagtatctaagatcagcaaaaaagaaatctcaggtactaatcctggctctatacctaacttgaaatatggcctcagttttgaaatctgtcagatgaatggatataagactagagaggccaccaacagtggctcctgcctgtaatcccaacattttgggaggccgaggcatgaggactcctgaaggccaggagttggagatcagcctgagcaacataaaaagactcatccctaaaactaaaaaaaaaaaaaaaaaaaaaaaaaaaaaaaaaaaaaaaaaaaagactagataacttttaaagtcacttctaggttgaaattctacatatgagcttaagaaaaagctatctttctagataagtgattcaaactcggtttaaactattagtttcatacacctcataacttgtagtactcataatttctgataaatttttataaactgtactcctacttctcacaaacttcttctcctcataatttaagaattaaattggaatacagcagtatgtgaatcatgaagcttaaataaatttgtgtatctatacattaaaacacatacctagcaaaatttcacttccagtagtagtatagtaacttgtatcagactaacccttctatatataaaattataaactctgtataaaatataaagaatgacaatttgaaggcagtagaaaagctgcaaaagcaggcagaaattgaaggaaactgactgtaaagaagggagctacaaatgagattcgcactgatgtggctttttactcaaggcgctctcccattccttgaaactagagtggaatggctagaactcagaaagtcttactagtttgaagagacagagttcagagctgccaaaatagctggaaagtgagagggagatctcagtacagcacgttactgtactgaatactgtaggcaattgaaacatgttaagtattagtgtatctaaacatatctaaacatagaaaaggtacagtaaaaatatggtattataatcttatgggaccaccatcattagcaatctgttatggaccaaaacatcattatatggctgtatttgtccattttcatactgctataaagaactgcctgaggccgggcgcagtggctcacacctgtaaatccagcactttgggaggctgagatggctggatcacctgaggtcaggagttcgagaccagcctggccaacatggtgaaaccccgtcgcttaatgaaaatacaaaaattagccaggcacagtggcacacacctatagtcccagaggctgaggcaggagaattgtttgtacctgaaaggcaaaggtggcagtgagccaagatcacaccactgcacttcagcctgggtgatagagcaagactccatatcaaaaaacaaacaaacaaaaaaaacctgccagagactgggtaattaacaaaggaaagaagtttaattgactcatagttcagcatggctagggaggcttcaggaaacttacaatcatggcataaggtgagggggaagaaggcaccttcttcacagggcggcaggaaggccgagttaaaggggaagaaccccttataaaaccatcagatctcatgagaactcgataacacgagaacagcatgggggaaactgcccccgtgattcaattacctccgcctggtctctcccttgacacgtagggattacaatttttaagatgagatttgggtagggacacgaagcctaaccatatcaatggcacatgactatataaggaaacagcaagtcaaaataacaacaggtgacttttcatcagaaaccatggcagccagaagaaaatgaaatgacatatttaaaatgataaaaaaaccacaattatcaaattagaatcctatatacaatttaaaaaatccttcaaaaatgaagatgagcccagccacagtggctcacacctgcaatcctagcactttgggaggaaaaggtgggaggatcgcttgaggccaggagtttgagaccagcctggacaacatattgagactccatctctataaaaaaataatttaaaaattagccggccacatatacgatttttaaaactgtatataggattctaatttgatagtttggattctaatttgagccactgtggctgggctcatcttcattttgaaggattttttaaattgtacaggattctaatttgatagctggtgggaatgtaaattagttcagccgctgtggaaagcagttcagcaatttctcaaagaacttaaaacagaactaccattagacccagcaattccattattgaaaatatgaccaaaggaatataaatcatacatgtatcataaagacacatgtacacatatgttcatcacagcactactgacaacagaaaagacacagaatcaacctaaatgctcatcaacagcagacgaaaatgtggtacatacacaccatggaatattatgcagccataaaaaaagaatgagatcatgtcctttgcagcaacatggatggagctggagggtattacctaagtaaactaatgaaggagtagaaaaccaaatattacatgttctcacgtgtaaatgggaggtaaacactgagtacacatggacaatgtatactcgatgtttcaagaacacgctgagggtgtactttgtgtacacattgagtacacatttgagtacacactgtactttagagagtatacactgagagtgtattttgagggtggagggtgggagaaaggtgaggatcttaaaactacctatagggtactatgcttattacccggatgacgaaataatctgtataccaaaccccctcaacacgcaatttacccatataacatctaaccaataatgtattctggaaactaaaagtttaaaaaaaaaagctaaggaaaagttcttcaggtgaaaaaaaatatcagacagaaaatgaaatctataggaaaaaaattttttaactgaaaataggtatataagtgtaaatgaccatacttttcctgctctttttcaaaagacgtatgaataaggcaaaaaatatataacattataacagagtttataacatggtgatatactatacaggagaacaacagcacaaggcactctcagaagtgggggcaaatataaatatagcattggaagagtcttatattttatatggagcagtaaaatactaaccctacatagactgtaataaattaagaatgaatattgtaatctcaagaatagagttcctcaacctcagcactactaacattttgaactggaaatttttttgccatgggatactattccgtccattatagaacattcagcagcatatctggcctctacccactagatgccagtagcaatcccacccccacatcatttcaaacatgtctccagacattgccaaatgtcctctggggaccaaaatcaccctggttgtactttagagagtatacactgaggatgtattttgagggtggagagtgggagaaagtgaggatcttaaaactacctatagggtactatgtttattacctgaatgacgaaataatctgtataccaaacccctacaacatgttatttatccatataacaaacctgtacatgtattctgtattccactaccttagaacaatacctaaaaaagcaatgcaagctaaaatgatgacagaactgtttatcaaaggtttttccttggctcacctaaggagcctctttagaaaactccctctaaatcacttcggtccccaccaagaaattttaataccaaagatatatctgtttatataatgtgattggagagccacaaacaattgtaatataaaaggatattctgtacccttttccaagaacctatgattgccctataggagaattaccactcctgttgagaatgcatactgttagtggaatatactgaaaaaaattcaattaactcaaaagaagataagaaagtatgaagagaggtatttttttaaaaaaataacagtatgcctaagttcaaccacaccaacaataacattaactataaatttttaaattgctttaaaataagacacataaataacaagccaataggagagataaaataggatactgaaaagatactaaatcctaacaaaggcaaaaaaatagggaaaagatacaaagaacacatgacacaaacagaaaactcaatcatatcaataattacattaaatatgactggcctaaaaactcccatttaaaaggtaaagattgtcaaattagattttttaaaaaagacacgacccaaacatatgctgtcaacgagagaaacagtttaaatacaaaacaaagactaaatataataggacagttgaaaagatacaagatgcaaacactaatcataaaaaatcaggagttactatattaatatcacacaaactgaattccaagataaagagtgtcacttgagaaaaaggtgaacatttcataaggataaaagaagcaatacatcaagaagatataacaacaaaaaagcctctaataatagagcttcaaaatatataaaattaaaaaggtaggactaaagagagaaacagataaattcacaatcatagctggagactataacactgagtcacagaactagaggaaaaaaaaaaaacgagtcagtgaagacatagaagactatgacccattaccaatcatcttgactagatatttataacactatacccccaaaaaataaaatacagacagaccaaatgataagaccacataatggatcatttaaaaaatcattaaaaagttggctgggtgcagtggctcaggcctgtaatcccagcactttggaaggccaaggcgggtggatcacctgaggtcaggaattcaagaccagcctgaccaaaatggagaaaccctgtctctactaaaagtagaaaattagccaggcatggtggcacatgactgtaaatcccagctactcaggaggctgaggcaggagaatcaacttgaatccaggaggcggaggttgcagtgagctgagactgcgccactgcactccagcttggtgacagagcgagactccatctcaaaaaaaaaaaaaaaaaagatttcataaaatgaataaactcctagcaagattatcaaaggaaaaaagagagcaagtatataatttaccaatatcaggatttaataaggagatatcgctaagatcttacagacattcaaaagataagggagcctgtaatcccagcactcggggaggccaaggtgggaggatcacttgtgcccaggacgtcaaggtcagcctgggcaatggagcaaatcttggctctactaaaaaaataaaaataaggataagggaatattaaaaactttgcacccagtaacttagacgaacatcttggatgaaaaggaaatccttaaaaaatacaatttaccaaaaatgacacaagaggaaatagaaaatatggatagccttgtatctaaagaaatctcatttatcatcaaaaatcttcccacaaagaaagctccaacccacatggcttcactgatacattttgtcaaacactgaagaaaaaatacaatccaccttatgagaaacaagtgcttcccaacctattttatgaatccagcataaccactgtatcaaaactgaaaagaaatttacagatcaatactcttgtaaatgcaaaaaacccttagcaaaatatcagtaagtccaaattggtaatatatttttttaaatacaccatgaccaaatggaatttattccagcaatgaaagtaattcaccatattaagagaataaaaggaaaaaatcaaatgaccatttcaatagaagcagtaaaatctttagaaaaaactgaccaccactcatgataaaaactctccgaactaggaatagtagggaattttttcaacctgataaagggcagcaacagaaaaggaacagctaatgtgatacttaagtggtaaaataaatgctttcccaataagatgagcaataaagcaaaatatccactcttaccacttttattcaacaatgtactggaggtcctatccagtgaaatatgatcagaaaaagaaatcagaggcataaagattggaaaggaaaaagcagaactgtggatgttcgcagataacttgaccatctatgtagaaaatctttaaactaacattaataagtgaatttcatgagacttcaacttacaaaatcaatacataaaacttgattgttgattgagaaggagcaagtgtgtgtgtaacagcaactttacaattctataaataacttcaaaatgtatatgaaagcttatttgatggtttgctccatgtggttctattggttgaaactttcaaaaataatacattgaaactctaagaaaagctaatttcacagtattgtaaatacattagttaaatctcagagtttcaataccattagaaaataaatttaattttcttatgtttactctccatgtataacctcaacagtcaaagtgagcttctctaatgtaccatgtggtttacacagtcactaccacagctctttactctctatggaaaaagcttgctgctgggtagtaaacaggaaatcatactgtcattttctttctcctaatcattttataacttatttctaaagtcattttgtgaataaaaaatgaacaaaaaaaaacacatgcatgcacaaaataaaggagaagaaaagacccctggacttagataaacactcaaaaatgtaaattgttttctgtaacaacttgttaaatttgactagataacaagaatcacatcttacagcataaccaagttcacaatctttatgttgctaaagtatattttgctcagcagaattaagctatcttgtgagacaactcatagacacaaaatctttatcctggcattaccaaataccgacactgtagttcatctaaataaaccatttcatggaatataagaaaaatattattcaaaggacaaagtcagtacaaagaaaactaagggaaaaagttatttgaaagccaaaactggttacacatagagaatacaacatgaaagttcagtttgttagatactaatacaaaaagtagaataaagtaacacgagcatggaacattttcatcaaaatgcttttaatgataaaaatcacctcttagatttatgacaatctcaaaacagtaacattatgaattgactagttatacattatattttaacttattatcaaggaactagctttccacatttataaaagactacttaggtttttatgaaattttattaagcaaatgaaagttaataaattataataagcccttaattaatactattgcaatttatttaattctataatttagaccttttaaactggctaaatttcctactttattaatacactaagtaccttcatagcaaatattaccactagctataagggaaaaaattaagagaagtgctgaaatccaatttagagatttagagtcacctagaacatacctacaggctcgtctttgagtaagatcatttagtaagtatttaatatatacagagatgcctcctatgctgatgtgcaaccaagttgtaaggagctgtcctggatccatcaaggaggaaaacgcagacaatactttacttgatgtttgctccgtgatgtttcttttattgccatttctaacaccaacaatactatggtaatgtgttatctcaattaatacttatcattttcaactgtccagaaaagtgtaaaaaataggatatcactattaatatatcactaataaccaaggttaggaaagcatttatcctacgtaataatgaatatttatctttcagccctttttttattttccaagaagatatttactgaaaagcaacttactcacattaaaagtacaaatcagattatatctggagataacaacaattgatgcatatagtcttacgaaaaaagactaatattcaaagtaataactatattataactttattatatcaattttttgttgttgttgttgatgagacggagaacatgactccatctcaaaaaaaaaaaaaaaacagaaaatacaggaaaaggtccgggtgcggtggctcacgcctgtaatcccagcactttgggaggccaaggcaggcagatcacgaagtcaggagatcgacaccaacctggctaacacggtgaaatctcgtctctactgaaaatacaaaaaattagcctggcatggtggcatcccagctactcgggaggctgaggcaggggaatcacttgaacacgggaggcggaggttgcagtgagccgagatcatgccactgcattccagcctgggtgacagaacgagactccgtctcaaaaaataaaataaaataaaataaaaataaagaaaatccaggaaaaatagccacagtccaaactagaaaccaaattaaagtatggcagctctggagtacaaagagagcgtaagaaatccatttgttctccaatgagaacacacggacacaaggaggggaacatcacacaccagggcctgctgggggtggggggcaaggtaagggagagcatgaggacctaatgcatggggggcttaaaacctaggtgacaggttgacaggtgcagcaaaccaccatggcacatgtatacctatgtaacaaacctgcacgttctgcacatgtatcccagaacttaaagtaaaataaaataaatccatttgctctctaagaatctcatcataccactttgtttagtcatattatttatataatgtaatattttaactgcttttcagaatcagcaagtataactattataaaccttgacatataaaataaatgttacagttgaaaaactggaaagggaatgtgaggaattcaagggaaagatgaggagaaaagctaattttttttttttacaacttataaagtggcaagtttagagacaatgtctgaacactctaaagttaactgttaaacagctataagtttaatcataaaggcaaccaaaaaataaaaggaagaaggtaggatcagtattaaaagttaaatccttctatttttcacaatggggagatattaggttactgaaggttaaagtttagtatattatataaaaaactggcataatgatgagacaattaaaaataggaaaaaaagttctaaaatgattatctctgacaaaggaggtagaaaagatagggagatttttatttttcattttatacctttgtgtgttattcaaatttttatgtttatgcaactattcatctcaaaataagcacatacacattattagaaacacatacacatacacatctcaaaataaacacatacacattattagaaaaatgatggcaaattcttattcatttttttttctatagtccatggactaaatactttctattatggtatttcaaagatataattaattaaacagactaaagaatcatcctaaacctttgataaatatgtggagatagcaacagcttacattgtgttagaactgtcaaaataaatccacaaccatcatctcatttaaccctcaaaaccatcttgtgaaagcagattttagagattagtaaagtaaaactcaaaaaggttcaagtgatttgccatccccctccaaaaaaagtagaataatataaatacgtttaaaaagtaaatcaaaaaagcctttataaagcactgaaatctgaaaatgctttcgtaatttataacaggagaatgacattgaaagaaattacacttgacaatacaaatggtcaggcacatcggaaaacagctgggcagtttgttaaacatatacttcttataaagttaaacacacacttaccatatgacccagcaatatcattcctaagttattacccaagacaaatgaaaacacattacacaaagacatgcactctaatgtccagactctttattcgtactaaccaaaagctagaagcagcccaaatgtccaacaagtgattaacagataaactgtgatatatccagaccatgaactactactcaaccataaaaaaaaagctaatgatatacaagacatggatgaatattaacagtattatgctatgtaaaagaaatcagccataaaaaaactatgtactgcatgattccatttatatgaaattctagaaaagcaaaattatagtaacagcagataaagtggttgccagggttaagggatgaggactgggctgcaagggagaacaaaggaacctctcgggttaatgaaaataaccactatatcgttttcagagtgtttgttacactactgtgtatctctggcaaaactcatcaaattatgactttacattgcttaattttattatgtaagttacgacttaataaggctcatttaaaaaataatccataatcacatttaactatgacaacagcttttcaggataggtatttactacagaccttcaaaaaatattaaaatcaatattaggagggaacttgtaaccataaagtagatatacaggaactaaaaggttctgagaatggaacagtcctcatcctactcgacgtggccatgtgggtaaacagtagttgcctagcaactaatctaaactctaaatttctaataaatatattgaccacataagcaggtgatctcacagatgataaaccgctttacatcgaagggttcttcctttaataataaaaaataataatgtgcttaagttatttatctaaagtaggagtgaacaaggtgtattaaacctagatgatgaaaaataaaaatacgaaattaaacataaacatacacacacaaaaaatccttgtcctcatttggccttttacgtcaggactttacttaccaaatttatgggattaatccatgagtttgcgggtgaaccctttccccttttctactttaagccattcccctacaaccattcaaactggcttaattctcttatttatatatttacatgtgattaaatgcatataggatcgtacttttacatatattaaatgattctaaagatatctctccagattacagaacctgtagacaccacagaaaaatacaacactttctgtaacacgctacacacaacataccagaaagtcaaacctaacttaactagattataaatgctcaaaatcaagaattacaaaaaaatcccttaataacaagcaaattcctaacacacgttaaatatatcatttctctcttactagacatagcatgacacagtttaacagtatcagaaaaaagatcaacttctaagacaccactcactgctagcactcttaccaaccgtattatttttggtttgcggagcacttacccctcttctgaacccaaccttctttcacaatggtaacatcgctcatgatgactcccctctgagcccccaacttggagaaatggtactttgtgatatcagctttagggtttggattctctgctgctgctgcccttcccactctctagtgatgactcagcctggaaggaagtattgaagaaagaattttttttccattcttgcaactcacagagcaataacaaacaactaattctttgtaaatgtcttcaactggcctgacctcacataaaagtctggctcttcaaactggggaacttatttattaaatagttctataatgaaagcacttccctagtcttgtgaccaatttcaaatgatagtgaaacttttaacctaagaggttgcaacaaaaaagtcttaagaaaaccagtcacgcctacccaaataatagagaaaatttgtttggtgatgtgtatttgaggtgaagagggaagagaatgaaagttaattgccctaaatccctgtaatttcagaagcaattgtaaattttttgttttttttttttttgaaacggaatctcactctgtcgccaggctggagtacagtggcgcgatctctgctcactgcaacctccacctcccaggttcaagcgattcttctgcctcagcctcccaagcagctgggactacaggtgtgcgccaccacgccctgctaatttttgtatttttagtagaaacggggtttcaccatattggccaggctggtctcaaactcctgacctcatgatccacccgcctcagcctcccaaagtgctgggattacagaagtgagccaccacaaccagtcgtgaatactttaagtgatataaaatacaacgtaccaagaactcatcatttacgtattcttactctgcctgttccaagaaatattttaaggagattaaaaaataattgatttcatattatgtacttattataaagtaaagtgaaacaaagggaatatgaaagtagaaaaaaatatttagtactcaagatgtgccaagaactgttacgggtacttacatctattattcttatgtgatctttataaccttatgaggatactattaattccatttcacagacaaggaaactgaggctcacacagataaaccaacttgctcaatttcaacacacctagtaaatgtggagccaagatctgaacccaggctgtctgactccagagcctgcattccaaaactatactgccttaagataaaaagaagtcagagtaaaggcatacatacttgggaaagatacgtcacaaatttggcatggagctcttgggaagacaatgcaaataacaaaacacaacaggctttcctatttacagtatccaaaaaaaatttttttttgagatggggtttccccccatcatccaggctagagtagagtggcacaatcatagctcactgcagcctccaatgggggtcaagcaatcctcccacctcagcctcctgaggagctggactacaggcaggcatcaccatgcctagctaatttttaaaaaaaatttttgtggagatggggtcccgctatattgtccacgctgcacaaatttttttaaaaagcaaaaaaagttcctcagaagaaatacaacttttcctgggacaaacatcgaatttatcccatgggtcttcttcataagatgtatgcgggaaagtcctcaaaaacaccctcccatatacagcaatgagttttacagggtcattgcttattgtcactctcaaactaaaaaggaaaatgccaacataaaattagtaaatccatttgcacagaaggggaccaaaaaatgtggtccaggtacaccagtgttatgtggtcaagaatcatatcataaattttagataactagaaaaatggatagatggactacacaaacatactctctcaacttggtttgtgataaatgatacatagcagttaagttcagtgttagactcccaacctagcgctaaattagactacaggtcattcttcaatgcaaattaagtgtggagcttaaccatttaacagtcaggaatcaagactaaacattctctagacagcctgactaaatagcctgacaaaagctatgtagctgaatgcaagaccaccagcctcatgtattatgaggtcacaggcagaacctataggtaaggctgagactcctcaaaatcaccatgagtctgttgctgtagagtgtcaaaaagggatattagtttgtaatcccagcactttgggaggccagggcaggaggatcacttatgtccaggagttcaaggccagcctgggcaacatggcaaaacccatctccacaaaaaatacaaaaattagctgggagtggtggcaggcacctgtagtcccagctactcaggaggctgaggtgggaggatcacctgagcccaggaagtctaggctatgctgagtggtgaccgtgcctgggtgctacagtgagaacctgtctcaaaaaaaaaaaaaaagaaaagaaaagaaaaagaatttggttgcacagttggccatatttttgtaatatgcatgtaaaatcattttaaaatctgtcttgggagcctcatcataaatttttaaaaatccatacatacatataaaatgcaattgatatatggtccattaaataccaagaatcagcttgacagaatttacccccagattaaactgagctacccaataggtatggaatcctctaacaaggttcatcacaatggtgtattaggaagagcaccagaaagaccaagaaacttgagtccctgccccacccagagtgatgctgtataaggtcactttaattatctgtgcctcagtttccggagccataaaaatgaaagtatagcattagatgaactctgaatagctttatagctcttccagagctaatatttatgattctgcaagttaaaatctacggagtatctacttcatatatagatggcatcataagtgaaagacatgattatacatacatagttcatgtcctcaaaagtttgataattggaagataaaacattcaaacagcatttcaactaagacaaaatttgggctaagctccattattggaaaaatactgtcctccttcccctcccatcccctagtcccccaaatacagtcagaagctttctaatatagattccaatatacatgtaaaatcctcctaaaatctgtcttgggaatctccctaattataaatttttttaaatccatccatatatatataggaattatctaatatagggaagaaaaattatcatttgcaattctagtgttttcttctagtaaatctttttactttcctctcataatatttagaaatgagaaatacctgtagttggtgatagagtactgaaaagaaacagaactaaaaaacacatcaacaagtcaagaagcatatattaattttatctacccattagtattcaaagattacttggcagagaaaatgagtttacatctaatttgattaaagactatgatgctataataaaatctgtaaacatttgagttatttaatttggcattttaaacaaatgaaaggtgatgttaatgggccagtcaatacacttttattaacttgatgctatggaaattattgtaccaaattttgcaaatttagaattatcactgttaactgtaataataggtacaaacaagaaaaacactagaagtgttgcagaattaggaaagtttaaataaaaggtatttttagaatgccacaataagtttttcttatgtgaaaatcactttcaaaagtgtagcaggggttgtttgaaagattaaatgaatacaggtaaagcacatagaacagtgcctggcacatggcaactgcttaccaggcattggttagcattaactctaaactgaatctaatcctatcccatgtaaaagatcaggacaaagtatttgttgtcggaagattcaggactatctttccaaaagaaggtatgctgtgtgaccaggatttaaaatactgatgcacatgctgaaacctggagtaacacaaatcttctaacaaaaattaattgtattattaatgcatattaacttaaaaataaaaatgccagtcagatcacaagactgatttgctcaaaatgaaaatggtttttcagttcttgcattttgttgctcaaatctaagatagttttaaatttttctttttaacacttcaaaacttaatcacactataaagacaagctcctatcaaatcatgctaagcatccaactaacaagttgttaacagtgattgccttaccttcccaaggacaaattcttgaactaaaagatataataacaaaagaaaacatagctatcttttcacgaaaatacacaaagtttaagtaaaggctaaacttctacaaaatcaatttgtaaaacaggttcctcattttaaagaaacccagatagctggaaatttccactgaatttttatgagaaaatttctgatgtttacatcaaaagctacagcttaaaaaataagtccttactttccacaagtctctatgctaagtccatttgttccctagtaagtttaatcaacacgtttatttagatttgcagtgattctgaaaacagattccttctgacagtgattttctgaatgaaatgtaaatattaaaagtttttaattaaaccagcacacagttcacactccagtatttgttaaatataatcttatttaaaatattttacagctatgaaattaatttttaaaaagtccaaagcaaaaccttaaagtactctgacatatacaatttagagtcgatgtcaagattattaagccaaaaattaattttaaattggaaaacaattcactccagtaataattatggaaagaaaaccaaatgaatacaaataataatttcacaatttttgcaggattactttggactatttttaaaacgctgtaagaaaacatgctgcaaaaccacaatgcaaatacacaactgaaaactaaaaccctacattcatctaaatttcaacagtctcattcatgtaatatttgtcctccctcactttaaaactggaacctcaagccaatcaaagatattggggtcaaccctagtaaggaaaacaaaaagatcttcaagtaccatctccctgtaaactttcaagtactatctccttggtaaactttccaagtcaagataatgtactggcaaaaggaaaacaattacagtccggatatatatcttgcatataattgtgcattaagtcataaaccttggaaaactagtaacttagtaataagttgctattttaattataaaatattttcatgttttagacaaccacccccggaatgtttgtattcgtttatacatattttgcaagtgatactcaagttctgaagactaatcttcatttcctacaccatctttattagactcttccaccttcgttttcctaagtaaatacataacctaaaccaatgagtttcactcatttgtcagcttcaaccactgacaaaacccagtggttgcctagtgatgtatagttctactaaaagacatatatgaccatgctttaccaaatacggaacacatgtctaaactgttgagacaactgccaatgtattaactacaaaaagccattattttttactttagcctcaactaaaatcaaagtgtgaacactttattatggctagaaattacccaatatagatgcataggtttcactgttgactttctatttggaaacttcatcaattgcaaactaccaggctttcaaccaaaatgccacattggtgaaatgagttggttttattttcataacaacattattttgatggaagaaatgtgagcatcccagctttgacttgtgggtaagcatttcctctgctttcagaacataaacagtaaataccggtattggaaaaacctggccccaacgagattctttatctctaggctaactgtagattcccgggaaatcccaaacaagggatggtgaccccgcctcggcgtcagggtcaacacagcaaccagctaggcttcaactttgggctctgaagggccccaccggcatcatggctgatgcggaccgatgcgccggaggaggtggacaaggaagaggctggtctgtttacttgcagccagagctgccgccgccgccagcagcgacagcatcactggatcagccaaacccagcatcttccgcacatttctattcttagcacacaactcccaagcggatcaaaaccccactactattaaaaacacagacaagcacgttacccacctcccacacacacacccccccccccaccccaccagtgccgtcttttcctgcgcgccagtggcggggaagggtgggggaaggaaggagaccccggggacgcctgtgcatcctcgccttcaccccaccccacgcgcagacagcctcagcgccagggcgcgcggcagacggctccctccccccaacccaaacacactgacaccggcgctccacgcgttatataacctcgccgccgcccccggtccaggcgggcgccccctccccacgccgcgcggcccgggcggggaggggcgaggggaaggagcgagagttgcgcagacagcaggcgccgggccggggcagcccagacacagacggtaccgctaggccgggaacacccctcccccggcccgctgcgcaccgccgccccccagctttccccggaaagcggggggtgtcggtgtcaaccgcgctgggcatcccccggcctccacacccacacccgaagcctccggtgacccagcccccgcccacgcccccggcgcggtgacaacccagaagcccccgcctcaccccaccccgccgccatcccccgcctgagggaggcagggagggcggaccggggcccggggcccggagggagtggaggccaggcggggagggggctagagttgggggcggtggctgttacctgcaacggcggcggcggcggtggcggccccgcagctgctcgggcggcggcggaggatggagccgggggggggcggggggaggagagggggcgactcgggggtcccccctccctcctcctcccctcctgtcctccccccaccccacagagcctctggcctcctggagcccggtgcggccggcgggagggcaagcgaagggctgcaggggagggagggagggagccggccgggccgggccgcggagctggagcgggaggcggcggcggcggcggcggcggcgggagggggagggaggagagagggcggcggcggggagaggaggaggcggagactctacatgggaatcggatatcggctacaaattcatcaccagaaaacaccgctcgggcgggggccgggtcacgccggcggggcggcggctctgggccccggggcgcgcccggcgcggggaggggttctgcggcctcctcccgggctgcgcctcgctgaggggaccccccgccgcctccccgccccctccttcctcccgctcggggccgccgccgatcggttctcgccgtcgccgcggggcttgttgttgactttgaggaaaactcctgacgtcaggggctggctctcggcgactggcgggagcggcttccccgcgtccccggccctgcccgccgcctctgctcccctccctgcccggccctcgtcctcaggcttccccgcgcccccaaaccagcggtgccccgcgccccctctcctctcgcgagaacatccccctagccagccagagccgggagcgggggcagtcgctcccgggcgggaagttctgggtttccccctcgcccgcgtggcccttggcgggcacccgaggcccgggagcggaggctcctcgcccagccgcttcctcggcgcatccgcccacccgccctggccgcggacgcgcgcgccgccaggccccgggcgtctcctccagtccgccgcggccccttggggagatgggcccggcgcgagggctcgcacctggaagcccacgaagtgggcggtgcccaatgaggtagggaccggagagcgcggagcagtccagaagccgaccccaccccctgcacctcggggaagagggaacccgggtcagcccgtagcaagaatcattcctgactatcccaggagaccacggcagaccaaaaacacctctctgaacagccttccgcaccgctcgctgcaagcattcgtccacacacggtacacagattgcgggcggatcgtaattcactcttgaaatcacaccctttttagggatattcgttttcaatgactttgggaaagccacgaggtactacatttactacgaagagaccgtttctttattttgaagtcagtgactcctgagactgcattggggacaacttttttgcacaatgaccatattttaccatgcagcgcacttcagaaaattataaaagtttacaagttttatcgcttctggaaacacctgggcagcatccctattatcccgccacgtggctctagccttgttgatgtacctgttactttctcccactgcaacatttttgttaatgtctgtggcttctttctgcagaagagttcctcctcctgacatgcacttcattctctgcttttctatgtcttgacaactctcttatggtagtcattttcttatactgtagccccctggtatttatgtactgtgtggtattaatatttatacttccaggttcacatcttttatgaactgtgcatctgttgggattgtggacaggagtaggaaaccaaataaaagggttttttaaaaaagtcagttttctccgtttgtaagggaaacttgtctccctgaccaccctggagcaaaatttgccattttaagataacacagtccgtctgagagaaagtcctgcaccatgcctttccccttttcccatatttcccagcatgctatgagctgatgaataaacagactttgtcctattttcgttgtatctataaaatatacataatgtattcccataattatcagacctctcacagtcactattggtaaaattattgggttacaggtttcttgctgtaaaacacaaaaataggtcatatttttattccatagtaccccaacttgctttttatttttaagaaaatagtcccttatgacaccagcactaaaaagagtgtctgaaactttaaatacttaacttttgagagtcagagtatccggaattactgaattactagatatctcttatcagtgagatgttcatttgttcccaaatttaacatcaatatatttacaagaactgaatgtgtcttatgagccatactacctcaaaatatttctcccagtctggtcagattgcattaaatcttaggtggattaaaccctaaaattcagtatgtgagaatggattatatactctcggcttcatgtatttgaagaattataagtttttatttctgttcaatttttgcttgtggactatagtagtttcataagtttccataataaaagcatgtttgattttgttattgaattactattgattagggatattatttatttaaataacgttgttctttctcttagactatgccggtatgaatttggtagaatctgccgattgtggtatgtcggtactccatacagagtgtgtggcagatttcttctctattttgttatcacatccagtaatatggagtgcagccagcatgttcatccctgggaatgtccctcctaaattttgcaaagaaagccttcattctttattacaccaaatattcttaagattaacatttctcagtattagttatttattcattttaagaaaaatgttcattcttctttactaccaatgactaagtttgatactgagctatttcttggtacttcccccatttcttgggagtaactaaaactggaaggatatttagaatttcagagcatctaatgtcttagtccattcaggctgctataacaaaataccatcaactaggtagcttataaagaacagaaatttatttctaacagttctggaggctgggaagtccaagatcatggcaccagcagatttggtgtctaaagagggttccgtttcctggtttgtaggtggtgacttcttgctgtgtcttcacattttagaaagagtgagggaactctcttggacctctttttctttttctttgtttttttttttttttttttttttttttttttttt

SEQ ID NO: 366 - DNA, 111846 bp, Homo sapiens
gccactgcactccagcctgggcaacagagcaagactctatctcaaaaaaaaaaaaaaaatttattactggagaaagaaaaaaaaatttaaataaatttagtatagcctaagtgtacagtatttataaagtttacaatagtgtaatgtcctagaccttgacattcactcaccactcactgactcacccagagcaacttcctgtcctgtgaacttcattcatgtgcccttttatactgtatttgtactgtactttttctatgtttatatacatacttaccattctattacaattgtctatagtattcagtagagtaacatgctgtacaggtttgtagcctaggagcaataggctacaccatatagcctaggtgtgtagttggctataccatctaggtttgcttaagtacaccctatgatgtttgcacaatgatgaaatcacctaacgatgcaattctcagactatatccctgtcattaagcaatgcgtgactactgttttcctatacatacacatctatgagaattcttaattcattaaatttttaaaaatttttatttttgagacagggtcttactctgtcacccaggctgaaatgcagtggtatgatcacggttcactgcacccttgacctcccagggtcaagcaatccttcaccttggcctcccaagtagtggggactacaggcacgcaccatcatgcccagcaaatttttttttattttttgtagagacgaggtctcaccatgttgcccaggctgatcttgaacttctggggtcaagcaattctctcgcctcagcttcccaaagcactgggattaaaggcatgagccactgtgcctagccgaaaaagtttaatttataaattaggcatgggaagagattaacaacaataactaataataaagcagaacaagtataacaatatatgttatagaagttatgtgaatttgtctttttggtaagagacaggaaaaaaagaaattatgtaaatttagtgcctcaaaatatctttgtttttttagagagggggtcttactatattgcccaggctggtctcaaactcctggcctcaaacaatcctcacttccaaaaaactgggactacaggcgtgagccactgcacccagcctcaaaatatcgtatctgactgtactcacctattttcagactgcagttgaccatggataactgaaaccatggaaatcaaaactgtggataacgggggactactgtagctataataataatagtaattaggtgctcaacaattcctcaagattgctagtgtctaagggcctggcgggtaagatgtatttattcaacaggtattaatctattacctaccacatgtaaagcactgtggggaacataagatgagtaaggcatggattctgcattcaatttgtagagctgtaactgttgatgagagctaactgcaagaaagatgctgaaggtcccaaattctgtagaaggatcaagctacttcctgggcaaggcgacatttaagttaggctttgaagggtgaaaagaatttggacataggaagacaggaaaaaagacattctaggcaaagaagatgccatgtgcaatggccaggagataagaaatccagggctacatacacagaatgcagcacgcttcagttggcttttgcaagaaggcatcaagtgctgtagtgggcatgaagtgggcagtgtaagtccatagtgactctgaattcagaactgattctgcaggcactcaggccaggcgtggtggctcacacctgtgatcccaacactttgggaggccaaggcgggcagatcacctgaggtccggagtttgagaccagcctggccaacatggtgaaaccccgtttctactaaaaatacaaaaattagctggatgtgatggtgtgcgcctgtagtccacaccatcacatgcccagctactcaggaggctgaggcatgagaatcacttgaacctgggaggcagaggttgcagtgagcctagattgtgccactgcactccagcctgggagatggagcaagactctgtctcaaaaaaaagtttttaaacaaatcacacatcagcaagaaaaatgaggggaaaagctcccttactctgccatttttacctaggaacatggccatgagcttcttatcctgaagcaggatggctcctttcaccaagtactcaaagtaggagtccacgccagccccgatgcctgcgtcctgggccacccacttgccagtgagcacatcaatgtggttgccgacctgagagagagaaagacacacggtcccaacgggaaggccgatggccaaagaaggatctactcacccccaaccctgactgcccagggagatgcagggcaggtgccccagtgcttcttgggaaacatgcagaccctgagagggaagggcaatgctggatcatggccagccttcctgtacatctgcatagtagagatgcatctcatgcacatttatgaggacttaattatacacattgagcaaaaaatgaaaaagaaaaatgatttggagtgtttatgtcctgcctagagtgagtgtgagatgggagatgagaatttgctgttgccgcaatctgtctgatttctcagcacccagcatgtgattccactatctgaagacacagacgtgctttacgtatttccataaattaactcaataagaacatccaccaagaagctgacagagtggttctaaggagagaaaccgaatagctggagacaggggcaaaaggggacttcaccaatgtcactgagtacccttttttgtatcctttgacttttttttttttaattgttcagtctctgtagagactgtgaaaaattggcaatgccggccaggcgcggtggctcatgcctataatcccagcacgttgggaggctgaggggggcaaaatcactggaggtcagaagtccgagaccaacttggccaacatggtaaaaccctgtctctaataaaaacacaaaaattagccaggcatggtggtgtgtgcctataatcccagctactcaggaggcagaggcatgagaatcacttgaacccaagagggggaggttgcagtgagccgagatcgtgccactgcactccagcctgggcgacagggggagactctgtctcaaaaaaataaacaaagatacgtatttttctattttattgtatttattttattttttgtatttttagtagagacatggtttctccctgttggtcaggctggtctcgaactcccgacctcaggtgatacgcctgccttggcctcccaaagtgctgggattacaggcgtgagccactgcgcccagccaaatatatgtatttttcatatggcttagaccctcatggaagctggtaacttcatctggtactcaaagaaatagctaactgttccgcgttggtttgtgtccccccaggagcacaacctcattctgcctgaaagtagttgatttggaaggtaagtccttgtaaacaccagtagaggagggggaagtgaggcagggcaagggaggcggcatttaaggggtatgccatcaggcaggtttccaccatgggaactggagttcaatcttgctggggagcttaggaattcagtgtagagctccagcttcggagtgatcccacccaaggggcagggaactggaatgtttatccaccaactcccatcagtatcagttaccggcttgagagctactcatgggtagcattaaatcctggtaccctcagccaaaggcaagcagagtggctccaggcaccagaggagacccacaggcaaagaggcgcaggtgatggcagttggaagactggccagtgtgcatggaaatgttaagagttgagaggatatgggcatggcaccaacagagtctactacggtcccactgctggagcaaaacctgcctgagatggactaagggatttactacaggtctccagcggggcaccttttttttttttttgagatggagtttcgctcttgttgcccaggctggaatgcaatggcgcgatctcggctcatcccaacctccacctcccaggttcaggcaattctcctgcctcagcctcccaagtagctgggattacaggcatgcaccaccacgcccggctaattttgtattttttagtagagatggggtttctccatgttggtcaggctggtctcgaactcccaatctcaggtgatccgcccgcctcagtctcccaaagtgctggaattacaggcgtgagccaccgcacccagccttaggggggcaccttcttaagggattttcggggagtcctcacacaagctttacttttcaagctggattagcaccagactgcataaaatgtgcctagacctaaatgcagtcttcctaagtcagagtgactcagcaaagttggtattaatatattaacgttactgctgaagtaactgaggaccagagaggttgagtgacttgctcagggtcacacagtttcgatgtagcaaggccagggcttgaatccagttctgactaaatccagtgttatgtcctggatggctttggctcaattactgttaatcttattgattatcccatttagaagctgaaactgaccttagagatcatctggtccaaagtgtgttcaatttccatgggttaatagtactggaagataaagggaagctctggtgttaaataagtttgggaaatgttaaattaaacaaagttgaatagatttctttactagaggatttttattctgctcatgtgcattctgactctccaaaaaagggggggatattatatctaatattcccctaacttaattggccaagactcattttttcatgcaactgccactcagtatctctcagaaccggtgtcctaagaaacacagcaaatacagatagacgctaaaaatgaaggccggacgagctgatgatctgaagccgtcaagtgagtcaggggcatgaaacatacgaccctcttcctagaaatcagagaatctcaactggtcaaagctgaatgcagcccctgctgcctgccagaaacgtgctttcccactctcctccccactccaagccaaacttgaattggaggcttggtctatttttggtgtcctgagcccaaatcctggaccactcccaaggtcaccctaagttttccttggcttgactgcaacttattgctcagagccctgggcctcgtaagcagggactcaaacaggaagggcagcagcgaacctaccagcccgatatctgaccggctctcccagaggcgcatcaaagccactctggccacatcttcgaacaccgggtcaccagtgaggctgctcagggtggcaaattcaacaatgaaggtcccaatccctgccgtacaggtgacaggggtctctcctgggttcacgccatgaagtaagttcactgttccatatggcatgccagtgggggtctgaaaggctgaacaatcgacaaattatgatcccggacaggagcagggggatagggatagttctgatacacgcccaaagcctgggaccttagccagcacttccctctttctcctgggtatcctgctagagtctgagccagagaaagataaatgtcataactggagggccctgagcagccacccagcccagatgctgtcaaacactgctctgcataaccttgggttcctgctcatcatgagggggcagggagcaggctgtgctccacacacactcgctttagctagagagctttacctatttttatttattttacactacgccttcaaagcccaggcaggtaacttattgtgatgcaggcagggtttaagccacagaaagtggtggggcttgtggcacaatgacaagagtaagccccgttcaaagccattcatagacttttggctcacgcctataatcccagcactctgggtggccaaggcaggcagatcacttgaggccaggagttcgagaccagcctggccaacatggtgaaaccctatttctactaaaaatacaaaaattaggcaagcgtggtggtgcacgcctgtaattctggctatctgggagactgaggcacgagaatcgtttgaacccaagaggcgtgggctgcagtgagctgagattgcaccactgcactccagcctgggtgacagagcgagaccctgtctcaaaataataataataataaacaaagccattcatagactttaaataaagatctctgctttaaataaagagtataggggctaaattatttttaaagggaagcaaaataggatataaaccactaaaccacggatatagtatgaccctcgatttataggtagggaaaaccatgcctgtaaagaagtaattcagccacaggtcacacagagagagtcaaacagagctgggatgggaacgcctcccctgtgcccaccccagccccagtccagttctctgcccgccccacccaagtggcacccaagtgccttctggttcaagacgagaactggacaaccagccagaggcagagatttcctctctgggcctaaaggtcaaacaactccagagcagcctatgcgtcaccaaactgtgaacaaaggtgtcgacacttccaagaaccacagggtctagcaactgtgtctgccacagacaagaaacttgcaatctggcaggcaccagcgggagagcaagtcacaaccaggaagggctctaagcaatatttcagaaaaagtcaggctgtaataaaaagaagaggagtgacaaaatcctgtttcttgacctttttttataaaatgaccaatgaccaaaaataattaaattataaaggaggagcagctaggcagagtttccagagtttcctccagggatgaatcacacaggacacaatgtctgcaaggagacgctcaagccatgagccatgagccatgagtgagacctgaacctagctcacccgctatcctcagctctcccccaaaggagaggcaagtgctatgtgagaaggataaagaggccgggtgtggtggctcacgcctgtaatcccaacactttgggagtccaaggcagatggatcacttgatcccgggagttcaagaccagcctgggcaacatggtgaaaccccatctctacaaaaaaaaatttagccatgcatggtggcatctgcctgtaatcccagctactcaggaggctgaggtgggagaatcaactgagcccagaagttcgagaggctgcagtgagccatgatcacgccactgcactccagcctgggcgacagagcaagaccctgtctgaaaaaaaaaaaaaaaaaaaaattaagaaagaaaagggataaataagtgagatggccaagaggtgatggaaagcacagtgtgacgtgtctgggtgtgaacagtcctcagagcctccaccacaccctgaagggaacacagtgtacagttgatgctactgagcctggtgttactgccccactagacaaaaacatggaggcttgacctgcagccctggacacagcttagccacaaaacaaatccctctcgttttaaaagtgttggacgttctctaagcagtttctccttcctgacctcattttagcctctccaaaacccgatgtggtagggaagtagaaattatgattctcatttgatagatggggaaaccaaactgtggagagaggccagacacagtggctcatgcctgtaatcccagcactttgggaggccgaggcagccagatcacttgaggtcaagagtttgagaccagcctgatcaacgtggcgaaacttcatctctactaaaaaatacaaaaattagctgggcatggtggcaggcgcctgtaatcccagctactcaagaggctgaagcaaaagaattgcttgaacccaggaggcggtggttacagtgacttgagattgtgccactgcactccagcctgggcgacagaacaagactccatcacaaacaaacaaacaacaaactatgaagagaaagagtggcttggtcacgatgttggctggcagagctgagtctagaatccagggctgctaatgctcacaccaacacccttccctgggcccctgttactccagcagtgtgtggaataactgtagtacctggaaggggacaaatgggctcattcaaaataagggtaatggccttccacccaccaggctggccaccttcaaccatcccctgcaaacaataatgaggtcaactcatccatccgggtcagggccccagcaggcccttaaaatgcccaggacactcctgatttccatggtgggtgcctggtgggtagaaagaccaaatacacctggtgagaaataccaggaattaattcagcactgccactctcatcttcagcaagggaagcaggacctactggacttcgtctctgccccatctctgtgtgggtcttacctgggaggagttttcgggccgcctcctcagccattctcaggagaggcccggaacagggccatccagcctctacttccaccccagccttcttggagagcagatgagcagacaggagtcctcctaccactacagatggcacagaaagcaaatggcacagtccaaagggaaagaccaagggatcaaggatctttcccctgtgcgagttaaacataaacactctattgtggggcgcatgttctcaggacctcctgaagctatttcacgggtaaaaacaaacaaacaaaaacctcactctgttggggtggctcactgggaaggagctagagccacccagcgaaaaaagagtcccttaatcccacatatttctatggtgttaagtttatggggttttcttctcttggttcatcacaggaacagtggctattttttgtaagtccctattgtgtaccaagcactaagtactactgtcccctcttcgtatgaagatactgaggttccatgagataaagtgacttgccccaggtcacccatctagtaggtggtagggctgagtatctttgattccaaagcccatgctcattccatttgtcactctgtctgtctcccagtcacctgtcatacctggggggaaggggtaatgatggttattacctttattttactaatttatctatttcaacttattatgcaatatgtagaactttttttttttttttttgagacggagtctcgctctgtcacctaggctggagtgcagtggcgcgatttcggctcactgcaagctccgcctcccaggttcacgccgttctcctgcctcagcctcccgagtagctgggactacaggagctcaccaccatgcccggctaatttttttggattttttttttgtagacacggtgtttcactgtgctagccaggatggtctcgatctcctgacctcatgatccacctgcctcagcctcccaaagtgctggatttacaggcatgagccaccgcacccggcctacttagaacttttaaaaagacacaaaggttcttggaaatacagctaaatagatatcctgagtggccctctcaatgaaaataactggtgaccctaagtttcaaaattcccctcctccctgcagagggggaataggagaccaaggtcagacctgccccaagtggaagtctgataaaaggtccctatgcaggccaggcatggtggctcacatctgtaatcccagcactttgggagccgaggtggagatcacgaggtcaggagatggagaccatcccggctaaaatggtgaaaccctgtctctactaaaaatacaaaatattagctgggcgtggtggcaagcgcctgcagtcccagctacttgggaagctgaggcagaagaatggcttaaacccaggaggtggaggttgcagtgagccaagattgcaccactgcacttcagcctgggtgacagagtgagactccgtctcaaaaaaaaaaaaaaaaagtctgggcacggtggctcatgcctgtaatcccagcactttgggaggctgaggcaggtggactgcctgagctcaggagttcgtgaccagcctggtaaacacggtgaaaccctgtctctattaaaaatacaaaaaattagccgggcatggcgttgtgcgcctgtagtcccagctactcgggaggctgaggcaggagaattgcttgaacccaggaggcggaggttgcagtgagctgagatcatgacactgcactccagcctgggcgacagagcgagactccatctcagaaaaaaaaaaaaaaagaaaagaaagaaagaaaagaaatctacatgtatgtaccttatggtaaaactgcagaacaccaaagggaaaaatgatctcgaatgcagccagaatccatgtaataataattattaatgctgggtgatgggcacgtctggttcattatgctattttctctacttttatgtttgaagttttccataacaaaaagtttttaaaaggagaagacagccaaagtgaaaaccaaaacaagattctctacaaataaataataattacattgacagattacttcttaacaataatgaaaccagaagataatggaaaaagtttttaacacaataagagaaagtaaccatcaacctagaaccatacacccagcaaaaatatcactcaaaggccaaccaaaggcagttgaataaagacattttcatataaacaaaagctgggaatgtttatgaagcacacacctgcattaaaggaaattctaaaggaaatactttagagaaaaggtctgagacacgaaaagaaaaaatagtcaaaaaagtggtaaataggccaggcacagtggctaaacctgtaattccagcactttgggaagccaaagcaggtggatcactcaagatcatgagtttgagaccagcctggccaatgtggtgaaacaccatctctactaaaaatacaaaaattagcctggtgtggtggtgcacaactgtaatcccagctactctggaggctgaggcaggagaatcgtttaaacccaggaggtggaggtgagccaagatcgcgccactgcactccagcctgggtggcagagtgagactctatttcaaaccaacaacaacaaaaaaagtggtaaatttatgtgtaaatgcaaaacttcaacaatatagaacaaaaattataatgtatggaaggtttaaaacaaataactaaaatatataactgtagcatataggtcaggatgttctctaagtcaggttttgcattattcaggaggagaacaaagattttcattaaatttagactttgataagttatgtttgttaaatttgcttggaaaactatgtaaaaagctagatattgtgcataatttccatattagtaagaggaaaatggaatggggggaaaacaatctaaagaaggcatgaaaaaggacagaataaaggaacataaagaagatggcacagggccaggtgcagtggctcacacctataatcccagcactttgggaggctgatggggggcggatcacctgaggtcaggagttcgagactagcctggccaacatggtgaaaccccatctctactaaaaatacaaaaattagcagggcacggtggcaggcacctgcaatcccagctacataggaggctgagacaggagaatcgcctgaacccgggaggcagaggttgcagtaagccaagattgcaccactacactcccgcctgggcgacagagtgagactccgcctcaaaaaaaaaaaaaaaaaaaaaaaaaagaagacggcacagagagcacaatactgtagaaatgagtgcaaatatatcagtaattacagtaaatgtaaatggattaaatgtgccagttaaagattgtcagaatggataaacaaaatataatacactatttgcaaaagatgtatctaatcataaaactacagaaagatggaaaggatagaaaaagatacatgggaaaatgtcaaccaaaagaaagctggtatcacttatattcctatcagaaataaaggtataagaatgaccttcatttacagatgacaaactgggctcagaagctgggagacatagcagcaagtacagcctcaaactcaggccggattcctaaaccaggattttagaccatgttgtccctctgctctcttctcttttttaatcttttatggatcatatgtctggaatataagtttcattgcagaaaacatacaaaataatggggaaaaatagaactctgccatccagaggtgacagctgttaagtggtctagaggttcgatgcaaataagggctgtgctggcttcacaagaatcactggaagtctgctaaaaatactgattctaggacccaacacagagattccaattcattaggtttagggtggagtctcaacatctgaattttttaaccacttgggagtggttcctatgggctgccaagtttggaagattaatgctgtagatttgcactgtccaatacaataatcactaactacatgtgactacttaaatttaatatcattaaaattaaatgaaattaaaaattcaattccatagttgtagtagatacatttcaaatgctcaatagctcatgtggttcgtggctaccatactggacaaaacacagctataagacatttccatcactgcagaaaattggattggacagacaataagttccaagaaggcaaggatcatatctttcttgttcatagctgtatgcctagtatcaaatacatattaaagaggtgagtaatctggtgtatttctttccagtctcttagtctcctgctcactttcatatctgaaactgatggggaaatcctgagacttccccacctcaccctccaggagggaagaagagctctgtcggtcagaggttttggccaagggtcctggcatggtcagtccttaaaatcctatttaccacttcttggtttacagaggcaacttcacactcttttttcttttaaaggtcctagagagcagcccttacctcgaatgtttgtttcaaacacagaggcgttcacatcaatatcaaagtccacgctgtcctggagcacttcaaccactctttggaattctgagacattccccaaaatctggaaataaaaaagagacctgacaatgaggctcttacatgcatggaggcagattcagagtctgggatcctatgttgatgtggccctcactaattccacttaagacctccagtttctgtcctaggattggtgacagcagaagaaaacactgagagctagaaatcatctagagacttcataccaagagactggttaagtaaattcctaggtcccaattaagagtcacgatgttgtcatttaaatggacacaatataaagaacgcaaactacgcatagaagtcttaggttttttgtttcgtttttttgagacagagtctcgctctgctgcccagggtagagtgcagtggcgtgatcttggctcacttcaaactccgcctcctgggttcaagcgattctcctgcctcagccccgagtagctgggattatgcaccaccatgcccggctaatttttgtatttttagtagagacggggtttcaccatgttgatcaggctggtctcaaactcctgacctcatgatccacccgccttggcctcccaaagtgctgggattacaggtgtgagcgaccgcacctggccaaaagtcttagtttgacatttgcagtagataccagttgtcaccttcaaccttgtggaaaacagaacaggttggttggcccaaaacaaattcattcctaccctctttacctcatggcctcccaccagaggttggaaatccagaagctttctcggcctcctttgctgctgcagttgattgtgttacccagtcaattctgacccttgagaggtctactgggggcacttctgggaaggcttctgttttcttaataccaagggacaaacacagctaacatggcttttagtctctctctttctgccttgaactcagactcgatttctgaagtgatggcagctatgtgagaccatgacgtactaagcattagaataaaagccaaaacactaacgatactagaatgcaaagctacaaagaggctggtctctaatgacacagttgcgtagctgacccaatgctagaaattacctctagactttcttttacttgagaaaataaaccctctttatttaaaccgttagccaaatgcaatctcaatctctcttcttttgatagtaacatctcaatttaccctcgaggaatcactcttccccggcagtcactcctgtggtttgggagaggctgatcccatccctctagctgtggagtgggtacttgacctgaaccagtccaagtcttttttttgagacagggtcttgctctgttacacaggttggagtgcagtggtgtgatcatagctcatcacagcctcgaactctgggacttgagcaatgttggcctcccaaagtgctgggattacaggcatgagccaccacacctggccctttttacctttctaagcatcaggtttcttttatatcttttttttgtttgtgtgagacagggttttactctgttacccagaccagagtgcagtggtgcgatctcggctcactgcaacctctgcctccctgactcaaacaatcctcctacctcaccctcctccctaacaaatggagccacagacatgtgccatcatgcctaattttttatatttttggtagagacggggtttcaccatattgcccaggctggtcttgaactcctgtgctcaagcagtcctgccgccttggcctcccaaagtgctgggattacaggcgtgagccactgtgcccatccctaagcatcaggtttcttaacgataagaaggagtaaaggtactaacctcaagaagttgttagaagaattaatacatgtctgtactaagccctacagaaacatactaactagtcactgatattatttctttataattttttttgagatgaagtttcactcttgtcacccaggctggagtgcaatggtgcaatctcggctcactgcaacctccgcctcccgggttcaggcaattctcctgcctcagcctctccagtagctgggataacagacatgtgccactatgctgggctaattttttgtattttaatagagatggagtttcaccatattggccaggctggtctcaaacccctgacctcaggtgatctgcctgcctcggccttccaaagtgctgggattacaggtgtgagccaccatgctcagcctgatacccttttattatcattgaacatggccactagaatgtaagcctctgaaaacaggagatgtcaaagtctctgtatcccccatagagctatgcaagcctatcacaattctccgtacataacaggtcctctataaatgtttgctaaataaatgaatctgcataagttgtagttcgtttttcccctatctagctaggcaaccacagccggacgcttcagaatcatgagatgcaaataaaaggcctaggagaggaattcatttttcacccacagtcacgctgccaaaagaggaaggatgttggttatgtaacagtggaaaggaaaagaaacagacgagatacttaccagcaaggtgtccagtgcatcaattagagtcagagaaaaactgcaaaaggacagaaatcccagccgcttagtaagaaaatcaaataccagatattatggctgccctagatctgatccccctaaaactaaatgaggcaaagtaatgcctctgcctgtcccacttacagtcacaacagagaaaccacagtgaaaatcgcaggtattctctgacccacttaatgcacctgggagggttggctgatgtagctcaattgtaattaaatacatcacctatagtctggcattctcctctaccattgggaggcagtataagattgcagcttaaagcacaggcctttcaccaattttcacctctaggaatttaattcacagtgaacagctgtttgagagtgttcatggcagtattgcttagaacagcaagaggctggaaagaacccaactgtccacccattaatgggtgattaaactgtgttataaacagtgcaaaactatgagttatcaaaaagattgttatcaagacttctatgtgctgatggaaagacattcgaattgtttttaatgaaaaagtcagggtggtttagtatgtttccatctgtttcaaaaagacatgctgacagaaagcagacagcaattgttagggtcagtggtggtgcagggatgaactataaagggccacaagggaactttttaaagtgacagaagtgtttcatatcttgactgtgatggtggtcacttcaaacgagtgtaggctgggcacagtggctcatgcctgtaatccgccagcactttgggaggcctaggtgggtggatcacctgaggtcaggagttcaagaccagcctggccaaatgacaaaaccccgtctccacaaaaaaattagccgggtgtggtggtgggctcctgtaatcccaactacttgggaggctgaggcaggagaatcgcttgaagccaggaggcggagtttgaagtgagccaagatcacgccattgcactccagcctgggtaacaagagcgaaactccatctcaaaaaaaaaaaaaaaaaaaaaagagtgtattttattatatgtaaattatgcctttaagaagttcattttaaaaagatacacatacacacatctatatatataatggtataaaccaagaatatttctggacagatacaaaggaaagttaatagttggaattctagggtatgggagatatttattgtatataatcttttaccacttgaatttgccatttgtatttactttgtttcaacttaaaaaaataaaaaccatcacaagttttgagtttaatttctcccgaccttagcacattcgtgtgtaaaacagggataatggcacctaactcgtaggggtattaagatactgagctgagatctgaatgacaagcagcagccagtgatgggaggaaaatggggagtgtatttcaggcacggggcacaccaactacaaagacttaagttttaggagtgtcacactccttcctggatctgaatgcccacctacataatgaaaggggtgggttttctaattcttggagcccttccacggtatctcgttactccagaaattgcctatgtccccacagctgatgcctgttactgctggggctgagctcagcgatccagcccacccggctaatccaggactttttttttcactgcgagaggctaagtggatcctggaggtgatagtaagaattgcggggagcgcggctctagctcagctgggagctttctggtgccggtgaggagaccatgaagccaccagccccagctgacccgcccgccgaggcccagagagtcagaccctggccgccccttgcccctccgctcgcactacctgccccaggtgtcgtgcccgtcacaggtgagaggtcgcagctcatcgaagggaaaggcattctccaggtagctgtcgtaggcgtggtagaacatggccttgactcgctccctgggtgggggacgagaaatcaggcatggggcaagaacacaaaaacaagcgggggaagaacaagatacagggcggaaagtgggaatcactagctgatttctccctgggacctagcggctgtgtcggagcaagtcggggtctgggatggacggaaagggaaaggaccgggttcacgcttcccattccccaactgcgaaagggcgggtcacagttcacctgtagtgggcgggatctggcgcggagccgtcgggacctggcgcaccatggtgctgaggcagcagcgcgcacaggaggccgagcgggatgagcagccggaaaggcatagagctcgtgtcctctcagcgcccccgcagcagcagcagccactgcaaccagttcatcctgggagctgctgcgggttcttccgggaatccgcgccactgcgcctgcgcgctgagaaatcagcctctcacttccggactacaagcccctgaatgcaatgggcagcgaaacgcggccgaagagcaacttcggatgtacggtttcggcaacactgatcaacgtgtcttaaagtcagtggctgttgttactactgttattaattaatgttttaataataacagctagcatgtattgagcacttattgtgtactagtactgtacggagcatttaaaatgcattctctcattcatttttttcaacaaccttattaagtatgaaggcagggtaagcatgagaaatgttcagcctttaccattattacctagcaggacaagccgcagacaaaactcctcagacaccgggttaaagaaggaaggagctttattcggccgggagcgtcagctgactcacttctcaaaaacggagctccccgagtgagcaattcctgtcccttttaagagcttacaactctaagggggtccgcgtgagagggtcgtgattgattgagcaagcagggggtacgtgactgattaccggtgcaccggtaatcagaacggaacagaacaggacagggattttcacaatgcttttccatacaatgtctggaatctatagataatataaccggttaggtcaggaggggtcgatctttaattaccaggcctggaatgcatcgccgggctgtctgactactgatttcacttctgtctttcttttaactcctacattttctttgaggcagaaattgggcataagacaatatgaggggtggtctgctcccttatttagggatattgagtttcccaaaccagttacttgttgattgtataagacacaactcacatttatttgtccaaaacttccactcttttttttttaaaacctcttgcattttccgatgctgtcactcttgaggtttcctgaaatcccgtcagttctaggaattcatgacacttctctcctcccaatttgggatgtggttacacaatcatggtcccttcagtctccatctcaaaccggaagctttacccctgtcagccctgtagaatgtcttgggtaagaatgaataccctggttgggcgcggtggctcacgcctgtaatcccaacactttgggaggttgaggtgcgtggatcacctgaggttaagagatagagaccaacctggccaacatggtgaaaccccgtctttactaaaaatacaaaaattagccaggggtggtggcgggtgcctgtaaatcccggctactcggaaggctgaggccggagaatcgcttgaaaccggaaggcggaggttgcagtgagcgaggatcgcgccactccactccagcctgggcaaaacagcaaaactccatatcaaaaaaaaaaaaaaaaaaaaaaaaaaaaagacaaatgactaccctggggcactatagctttcaggaggtttgtgatccatttctccattccccttattcccaagtttctaaaatttggtcagcaccttagaccacagcaacacccatgactttggtcagtgtgacatgcggtagaaccaacactggatttgaagtcagatctaggatccagttaattacaactctgtcactcatctataacctgtgtatgtgaccctctccttctctggggctagcatccttgtctataaataatgaggagtttgaacaaatggatctttaagatccttttcggtcgagctttctatgattctaggattggctatctcttatttgctgaaaaagtcagatggaagtgatagctcagtttgttgagccagagtgcagccaggcctcccaaagtgctgggattacaggcataagccactgtacccagcctgggatgtttttagaaactcttcttggccgggtgcagtggctcacgcctgtaatcccagcactttgggaggccaaggcgggcggatcacgaggtcaggagttcaagaccaacctggccaatatggtgaaaccctgtctctactaaaaatacaaaaattggccgggagtggtggcagacgcctgtagtcccagctactcaggaggctgaggcaggagaatcgcttgaacccgggaggtggaggttgtagtgagccaagatcaagatcaggccactgcactccagcctgggagacagagcgatactctgtctcaaaaaaaaaaaaaaaaaagaaactcttcttggggcttccaaatggaagggaaaggagatgacagtaagctgagacctggataacaacacaggagcactgtattcgtttcctgtgattcctgcaacaaattaccacaaaccaagtggcttaaagcaacagaaatttattctctcgcagtttgggaggtcaggagcctgaaatcaatttcactgggctaaaattaagttattgacagggccacacccactccaaaggctctaagggataatccgttccttgcctctctagattctcctgactgctggcattccttggcttatggttgtatcactccagtatctgcccgtgccttcatatcgccttctctgtggatgtgtcacatctccttctgcttttctcttataaggacatttataattgcatttaggaccccccccgcgccccccccaacccagataatacaggataaactcccattccaagatttttaacttaatcacatctagggggaaaaaaaaaaaaaaacaccatttttccaaatagagaaacatttacagtttccagagattaggacctggactttaggtggctgtttccagcctagcgcagggactaaatatttttcagacctgggcctttccctgtgacgaaattcaccttctccatattataaatcctatagcttatctttttgtctcccattcaaaattctagtgtggataaaacttttgcaggaagggtgggttcaggttgcctggatttggtaacgataggtctctctttatgagcaagattgaaacactcatgattttcctttatattctttttctagcttgatgtcattctccacactgtcactgaacaaataaaaccatgacttacgttttcacaattcatgtgactatatgttctctaatgagaataaaaaaattgttttaccctctggaaagtatcaggactcttctttctctcactctgtgtttatgatattggattctagaaggttatgacccaccagtgaagtgtcacacttgagcatttacttgtgaagagactcagggtaagttgcctacctctctgagactcaatttcctattgtaaaatacagaaattgatgaggccataaaggaattctgggaattaaatgggataatgaaagtgaacattctcagcacagtgactggtatatattaaattcttgatacatattaattctcttccctgcctccccaactcttcttttttttttaaggcagggcagttgtttccatttactgagcatctgccccgagtcatccaaggtgttataggcaatagttcctaccctcaaaagtttgaggcacagtgctgagcatataactaagattccaaaataatcaagtcatagtcctttcccttgaagtgcttgcaattttgttagaaggggaagatgtcaattggagaatacttggaatcatagggtgttcaagtcttccctgtgggtgaatagagtttggagggagctcagatcacatcagtatctgaggccaatgtcctcggactctgtgttcagtggaacaagacttggactggttgtcggaaacccttggtcttgttacttgtttatccactatctctgtgtgatctcgggcaagtcattttcccttttggggactcagtttccatatctggaagatgaaagagtgagactatctctcagcacaaggaaaatattaacagatccatacagttattgcaaaaaatcagaaaacagaattcaacacacatcgactgcacaaatttcccccagaaacatccatgaagcagaataaaacagtgggacagcattccaaatggaatttgactatttgccaactaaacaaggaagaggagggggatggggagggggacaagaagaagaaggagaaaatagtcacgtgtattgataatagcgaacatttacatagcaagtaatgttctttgtactttacatccatcaacaccattaatccttaccacaaccctctgagaaagtgtcattatcaccattttataaaccaaaaacctgaagcacagattctaagaattgaagaaagatttagcaacttaatcaatgtctcataccgaataagtagaagagtcaagatatggacccaaacagcctatactctaacgcattaatgaaaataatgacaaatatataaataaaaggccaacacagaattcaacaatggagatctggcgaactgctacagtgtcctctagctttagcttcatgtggttttagggtcaacatttccttcccttttgctagaaagttagagggaaaagctcagttccctgaagttggaagccaaggcattttagatcccctttggccaagtacactcgacctcttttagcagggaagaatcctttttgtagcatctggaggtcatttggttctcccaactcccaaagcagggcttgcacaatacatacttttgacttgccaaaaaataagtttatccctgggaaatttcccatccatctgttgctttgtagaaatgcttgaactttgcatgcagtatgtccaaacatttcgatcgactccctggttagagtctcagacctcgttattattattattattatttgagatgagagttttactctcgtcacccaggccatagtgcagtggcgcgatcttggctcaccacaacctccacttcctgggttcaagtgattctcctgcctcagcctcccgagtagctgggattacaggcatgcgccactatgcccggctaatttttatatttgtggtagagacagggtttcgccatgttggctaggctggtctcgaactcctgacctcaggtgatccgcccacctcagcctcccaaggtgttgggattacaggcattagccaccgtgcctgaccttacacttttattcttattttatttttcttctttttgagatagggtctcgctctgtcacctaggcactatcaccactcacttcagcctcgacttcccaggctcaagtgatctttccacctcagcctcccaagcagctgggaccacagatgcgtgacactatgcccagctaatttttaatttttttgtagagacaaagtctcgctgtattgccgaggccggtcttgaactcctgggctcaagcaatcctaccgccttggtctcccaaagtgtagagattacagaaatgagccaccacacctggcctcagaccacgtttttattatgctcatattccaagtgaactcagacctgtagctaaatctgccacagaattgtgcactttaaaatggttcagatggtaagttgtgtcacaagtattttgtcacaatttcttaaaaattaaaaagtgagccctctccctctccctctccctctccctctccctctccctctccgtctccccacggtctccctctcatgcggagccgaagctggactgtactgctgccatctcggctcactgcaacctccctgcctgattctcctgcctcagtctgccgaatgcctgcgattgcaggcacgtgccgccacgcctgactggttttggtggagacggggtttcgctgtgttggccgggccggtctccagcccctaaccgcgagtgatccgccaacctcggcctcccgaggtgccgggattgcagacggagtctcgttcactcagtgctcaatggtgcccaggctggagtgcagtggcgtgatctcggctcgctacaacctacacctcccagccgcctgccttggcctccctaagtgccgagattgcagcctctgcccggccgccaccccatctgggaagtgaggagtgtctctgcctggccgcccatcgtctgggatgtgaggagcccctctgcctggctgcccagtctggaaagtgaggagcgtctccgcccggccgccatcccatctaggaagtgaggagcgcctcttcccagccgccatcacatctaggaagtgaggagagtctctgcccggccgcccatcgtctgagatgtggggagcgcctctgccccgccgccccatctgggatgtgagagcgcctctgcccggccgagaccccgtctgggaggtgaggagcgtctctgcccggccgccccatctgagaagtgaggagaccctctgcctggcaaccgccccgtctgagaagtgaggagcccctccgcccggcagctgcccctactgggaagtgaggagcccctcagcccggccagccaccccgtccgggagggagatgggggggtcagcccccccacccggccagccgccccgtccgggagggaggtgggggggtcagccccccacatggccagccgccccgtccgggagggaggtgggggggtcagccctccgcccggccagccgccccgtctgggaggtgaggggcgcctctgcccggccgcccctactgggaagtgaggagcccctctgcccggccagccgccccatccgggagggaggtgggggggtcggccccccgcccggccagccgccccgtccgggagggaggtgggggtgtcagctccccgcccggccagccgccccgtccgggagggaggtgggggggtcagccccccgcccggccagccgccccgtccgggagggaggtggggggggtcagcccccctgcccagccagccgccccgtccgggaggtgaggggcgcctctgcccggccgcccctactgggaagtgaggagcccctctgcccggccagccgccccgtccgggagggaggtgggggggtcggccccccgcccggccagccgccccgtctggtgggggtgtcagccccccgcccggccagccgccccgtccgggagggaggtgggggggtcagccccccgcccggccagccgccccgtcagggagggaggtgggggggtcagccccccgcccggccagccgccccgtccgggagtgaggtggggggggtcagcccccctgcccggccagccgccccgtccgggaggtgaggggcgcctctgcccggccgcccctactgggaagtgaggagcccctctgcccggccaccaccccgtctgggaggtgtgcccaacagctcattgagaacgggccaggatgacaatggcagctttgtgggatagaaaggcgggaaaggtggggaaaagattgagaaatcggatggttgccgtgtctgtgtagaaagaagtagacatgggagacttttcattttgttctgcactaagaaaaattcctctgccttgggatcctgttgatctgtgaccttacccccaaccctgtgctccctgaaacatgtgctgtgtccactcagggttaaatggattaagggcggtgcaagatgtgctttgttaaacagatgcttgaaggcagcatgctcgttaagagtcatcaccaatccctaatctcaagtaatcagggacacaaacactgcggaaggccgcagggtcctctgcctaggaaaaccagagacctttgttcacttgtttatctgctgaccttccctccactattgtcccatgaccctgccaaatccccctctgtgagaaacacccaagaattatcaataaaaaaataaatttaaaattaaaaaaaaaaaaaaattaaaaagtgaggctgggcacagtgcctcaagcctgtaattccagcactttgggaggctgaggcgggtggattgcttgagcccaggaatttgagaccagcttgggcaacatggcaaaaccctgtcactacaaaaaaaaaaaaattagcagggtgttgtggcatgtgtccataatcccagctactcaggaggctgaggtgggagggtggaataaatggaatgtgatccaacaaaattattattattattattttgatgatgtctattgcccttttgaaatacccaattctggcagggtgcagtggttcacgcctataatcccagcactttgggaggccgaggtgggcagatcacctgaggtcaggagtttgagagcagcctggccaacaaaccccatctctactaaaaatacaaaaattagccagctgtgttggtgagcgcctgtaatcccagctacttgggaggctgaggcatgagaattgcttgaacctgggaggtggaggttgcagtgagccgagatcatgccactgcactccagccagggtgacagagcgagactctgtctcaaaagaaaaaaaaaaaaaaaaaagaaatacccaattctttcacagaaaatatgttcttactggctggcggggagaggggtggttggtaaatgggaaaagggtgcttcctttgctgatatccaaagcagatactttctctgcctatttgatgatacaaaactagccctaccacaccaggctaagggagagaagaggatccgtgtcctacagaattccccctattagcctacctgccccatagcccccaaactctgctgctaatcaactgtgccaggtcaggaagaaagaaactggagggaaagaagaagcctaatagattgaaaatcccttcagcaaacattttttgagagccttataactgttagtgtctactgaattaaacttactagtgttaagaaaaattatctgaaacatgttactaaggtaaaaagatgattgtgtgactttttgctgtcatgataaagcattgactagcaagtctacttgtcatctgtccctgaagagaaacgtgacactattttcatattaattacggcccagacattgtacaattctgtaaagtaataagatgtgacaatttcctttcctgcctggtagagaagataatcccaaaggttatgatattattactctgtaggacattaacccatttagtatttaatttagcaatcttacttcaatattttccttttccattgactataaaaactcaagttcttttttcttttttttgagacaggtctcacattgttgcccaggctggagtgcagtggttcgaacacggctcactacagtcttgacctcccacatcccaggctcaagtgatcttgcctcagtccctcaagtagctgggactataggcatgtgccaccatggccagctaatttttgtatcttttcgtatagacggggttttgccatgttgcgcaggctggtctcaaactcctggctaagcgatccacccaccttggcctcccaaagtgctgggattacagatgtaatcccaccatgcccagccaaaactctagttcttatattctattttgaactggctttgtcgtcctgcttgtcccttcattaatgagttaaatgaaactctgacccatgctcactgtctatttcaatgagaattatggttggttttgtttgtttgtttgtttgttttgagacagagtctcgctccgttgcccaggctggagtgcagtggtgtgatcttggctcactgcaatccccgcctcccagattcaaatgattcttttgcctcagcctcccaagtagctgggattacaggcacctgccaccactcccagctaatttttgtatttttagtagagacggggtttcatcacgttggctagactggtcttgaactcctgacttcaagtgatccatccactttggcctcccaaagtgccgggatttacaggagtgagccactgcgcctggccaagaattacatttttaacatgctgacagttgtccttgacactaagtgtcagaccctggattaagtaatttatagacccatgatactcctttgagatagtttttgtccccattttccagatgagaaagtgaaggcacaaaaagataaaagaaattttctcagtgccagttttgtgccaggagctttactaagttacagtttttttctccttccctcgaagtcctgtttatctattcattgattaaaaaaaaaaaaatcattgagtacttacgatgtgccaaatactctgctaagctggtaatacagaactttaaaacacattctctgccctcttatggcttttggtgtggaagacagatgcataaatagacaattatcatttaaagaagtaagggaggaaaactctctgaacttattctggtttgggggctgcctgcaaaaaaattaattaatgaattaattaattaaaaattaaaaaaaataaaaagaactaagggaaagagagggctccagtagaacagagggagcatctaaccctggcttgtggacatgaagtcagggaaggcttcctgtagtaggtgacacctgagtattctaataggaattagtagggctgaagaaggtggtgggaagcacctcaattcaaaattttgattcctttgtgtattatgaaaggctcttctgactcctgcttacctcctcatatcacttcttccttcctatcacctactcctatttggccatacttaagtattactgctttctcaagtatgttatattctctctcctttcctattatattcttttgtaccttcttcaccctgtacttgaaacaactttttcctcacccctacttgccccttaggcattatcggggttttttgtttttgtttttttctttgtttgtttgtttttgagacagggtcttgctctgtcacccaggctggagtgcagtggtgcgatctcagctcactgcagcctcagcctcctgggctcaagtgatcctcccacctcagcctcccgagttgctaggactacaggcacacgtcaccacgcctggctaatttttgtattttttgcagagcccagatgaactcctgggctcaagcaatcctcccacctcagcctcccaaagtgctgggattacaggtatgagccaccggacccggcctggaaagcattcctttttaaaccaggaaaatggcaagaatattctcttatattctctatcactttttttttttttttttcctggagacagagtcttgctctgttgcccaggctggagtgcagtggcacgatctcggctcactgcagcctccgcctcctgggttcaaacgattctcctgcctcagcctcctgagtagctgggattacaggcatgcaccaccacacccagctaatttttgtatttttagtagagatggggtttcaccatattggccaggctggtttcaaactcctggcctcgagtgatccacccacctcggcctcccaaaatgctgggattacaggcgtgagccactgtgcctggccttctattactatctctgttaaacattgtactagaggttatagccagaacaataagttgaaacaaacattataaaaattaaaaaagaagaaataatctgtcattatctattggtgctatgaatatgcatgtagaaaatccaaaagagtctaaaaataattattataacaaacaaaagaatttattaaggttgctagaaacaaaactaatgcaacaaaatcatcagtacttctatatgctgagaataagcacaccatgagatttaaaaaaaaattatttgcaataatatttttaaaatatggagaacttgactgggtgcagtggctcatgcctgtaatcccagcactttgggaggccaaggcgggcagatcacttgaggtcagagtttgagaccagcctggccaacatggtgaaaccctgtctctactaaaaatacaattagactggtatggtggtgtgtgcctgtaaccccagctactctggaggctgaggcaggaaaattgcttgaatctgggaggtggaggttgcagtgagccaagattgtgccattgcactccagcctgggcaacagagcaagactctgtctcaaaaaatatatatacgtatgtatatatgaagaacttagaggggaaaacttaacagaggatgggccatatgttcagagagaaaattatgaaactctgagagataccaaaaaagatgtaaacaaatgaaaaaaatacaccctatcatgcactggatgattcaatattgtgaagatgtcaattcttcccagtcatttacatgctaaatgcaataccaaccaaaacttcatcaacgtgataaaaaagattccaaaatttaggtgtagacgttcaaatattcaaaaatagctaagacactcttgaagaacaaagaggaaaggcttgatctacaagatataaatacattatgaaataatactaatcgagggccaggcactgtggctcacgcctgtaatcccagcactttggaaggccaaggcaggtggatcacctgaggtcaggagttcgcgagcagcctgaccaatatggagaaaccccgtctctactaaaaacacaaaattagccgggtgtcatggcgtgtgcctgtaatcccagctactcgggaggctgaggcaggagaatctcttgaacccgggaggcagaggttgcggtgagctaagatcctgccattgcactccagcctgggcaacaagagtgaaacaccgtctcaaaaaaaaaaaaaaaaaaagagaaaaaaaaatttaaaaaaaaaagaaataatactaattgagataatgagcattggtaccaggtgagacaactggaccactgaaacagaatagacatatttactgtaagtcagagatgccactgcagatcagtaaggaaaggccaacttttgataactggttctgtctgggacagtggatatccattaaaagaaactaatcttgacctccacttcataccatacctcaaggtgaaagacaaaactaaaaagctttgaacataaacagaatatcttcatgaccttggggtttagggaagggttgcttaaataaggcacaaaaagtacaaactgtaaaggaataggttgataaacataaccaccttaaaattaggaacttttgtttatctaaagacatgataaagaaagtgcaaagcggctgggcgcggtggctcatgcctgcaatcccagcactttgggaggctaaggtgggaggatcacttgagcccagaagtttgagaccagcctgggcagcatagcaagacctcatctctacaaaaataaggttttttaaaaaaaaaaaaactgtgacggttaaaccacctactcaagactcagcaatggtggatgccctacgacacctaggtggcgtagcctactatacccctaggctccttggtatagcctattgctcctaggctacaaacctgtagaacatgttatgatcctgaatactttaggcaactgtaacacaacggaaatatttgtgcatcttaagaaatctaggatttgctggcaagatggccaaataggaagagctctggtctgcagctcccagtgagatcgatgcagaaggtgggtgatttctgcatttccaactgaggtacccggtttatctaattgggactggatgggcaatgggtgcagcccacggagggcaagccgaagcagggtggggcgtcgcatcacccaggaagtgcaagaggttaggggatatcccccctagccaagggaagcggtgagggactgtgccctgggaaatggtgcactacggcccagatactgcgcttttcccaaggtcttcgccacctgtagaccaggagattccctctggtgcctacgccaccagggccctgggtttcaagcacaaaactgggcggccatttgggcagacaccgagctagctgcaggagttttcttttttttttttcataccccagtggtgcgtggaacgccagcaagatagaatcgttcactctgcaggctgggcgcggtggctcatgcctgtaatcccagcactttaggaggccaaggtgggcagatcacgaggtcagaagttcgagaccaccctggccaacatggtgaaaccccgtctctactcaaaatacaaaaattagctgggtatagcagtgggggcctgtaatcccagctactcaggaggctggggcaggagaatcacttgaacccaggaggtggagcttgcagtgagctgagattgcaccactgcactccagcctggacgacagggcgagactccgtctcaaaaaaaaaacaaaaaaaaaaaaacaggtttgttcaatccgctggaaagggggctgaagccagggagccaagtggtctggctccatgggtcccacccccacagagctcagcaagctaagatccactggcttgaaattctcgctgccagcacagcagtctgaggtcgacctgggatgcttgagcttggtggtgggaggggttgtccgccattgctgaggcttgagtaggtggttttaccctcacagtgtaaacaaagctgcagggaagttcaaactgggtggagcccaccacagctcagcaaggctgctgtggccagactgcctctctagattcctcttctctgggcagggcatctctgaaaaaaaggcagcagccccagtcagggacttacagataaaacccctggccagcacggtggctcacgcctgtaatcccagcactttgggaggccgagacgagtggatcatttgaggtcaggagtttgagactagcctgactaacatggtgaaacaccatctctactaaaatacaaaaaaaatgagccaggcgtggtggcaggggcctgtaatcccagctactcgggaggctgaggcaggagaattgcttgtacccaggaggtggaggttgcagtgagccgagattgtgccactgcactctagcctgggtgatagagtgagactctatctcaaaaaaaaaaaaaaatctccctgggacagagcacctgggggaaggggtggcttggaaacagcttcagcagacttaaacgtccctgcctgatggctccgaagagaactcccaggacaacattcgagctctgataagggtcagactgcctcctcaagtgggtccctgacccctatgtatcctgactgggagacacctcccataggggccaacagacacctcatacagaagagctctcgctggcatctggtgggtgcctctctgggacaaagcttctagaggaaggaacaggcagcaatctttgctgttctgcggcctccagtggtgatacccaggcaaacagggtctggagtggacctccagcaaactccagaagacctgcagcagaggggcctgactgttagaaggaaaactaacaaatacaaaggaatagcatcaacatcaacaaaaaggacgtccactcagagaccccatctgaaggtcaccaacatcagagaccaaaggtagataaatccatgaagatggggagaaaccagcacaaaaaggctgaaaattccaaaaaccagaatgcctcttctcctccaaaggatcacaattccttgccagcaagggaacaaaactggaaacagagaatgagtttgaagaattgacagaagtagacttcagaaggtgggtaataacaaactcctccgagctaaaggagcatgttctaacccaatgcaaggaagctaagaaccttgaaaaaaggttagatgaattgctgactagaataaccgtttagagaagaacataaatgacctgatggagctgaaaaacacagcacgagaacttcgtgaagcatacacaagtatcaatagccgaattatcaagcagaagaaaggataacagagattgaagatcagcttaatgaaataaagcgagaagacaagattagagaaaaaagaatgaaaagaaacaaagcctccaagaaatatgggactatgtgaaaagaccaaatctacatttggttggtgtacctgaaagtgacagggagaatggaaccaagttggaaaacactcttcaggatattatctaggagaacttccccaacctagcaagacaggccaacaatcaaattcaggaaatacagagaacaccacaaaatcaatgtgcaaaaatcacaagcattcctatacaccaataacagacagagccaaatcatgagtgaactcccattcacaattgctacaaagagaataaaatacctaggaatacaacttacaatggatatgaagacctcttcaaggagaactacaaaccactgctcaaggaaataagaggtcacaaataaatggaaaaacaatccatgcttatgtataggaagaatcaatatcgtgaaaatggccatactgcccaaagtaatttatagattcaatgctattcccatcaagctaccattgacttccttcacagaactggaaaaaactactttaaatttaatatggaacaaaaaagagcccccgtatccaagacaatcctaagcaaaaagaacaaagctggaggcatcacgctacctgacttcaaactatagtacaaggctacagtatacaaaacagcatgatataccaaaacagatatatagaccaatggaacagaacaaagccctcagaagtaacaccacacatctacaaccatctgatctttgacaaatctgacaaaaacaagcaatggggaaaggattccctgtttaataaatggtgttggaaaaactagctagctatatgcagaaaactgaaactggaccccttccttacaccttatacaaaaattaactccagatggattaaagacttaaacataagacctaaaaccataaaaaccctagaagaaaacctaggcaataccattcaggacataggcatgggcaaagatttcatgactaaaacaccaaaagcaatggcaacaaaagccaaaattggcaaatgggacctaattaaactaaagagcttctgcacagcaaaagaaactatcatcagagtgaacaggcaacctacagaatgggagaaaatttttgcaatctatccacctgacaaagggctaatatccagaatctacaaagaacttaaacaaatttacaagaaaaaaaacaactccatcaaaaagtgagcaaaggatatgaacagacacttctcaaaagaagacatttatgtggccaaaaaacatatgaaaaacagctcatcatcactggtcattagagaaatgcaaatcgaaaccacaatgagatactatctcatgccagttagaatgatgatcattaaaaagtcaggaaacaacagatgctggagaggatgtggagaaataggaatgcttttacactgttggtgggagagtaaattagttcaaacattgtggaagacagtgtggtgattcctcaaggatctagaaccagaaataccatttgacccagcaatcccattactgggtataaggattataaatcattctactataaagaatacatgcagaggtatgtttactgtggcactattcacaacagcaaagacttagaaccaacccaaatgcccatcagtgatagactggataaagaaaatgtggcacatatataccatggaatactatgcagccataaaaaaggatgagttcatgtcctttgcagggacatggatgaggctgaaaaccatcattctcagcaaactaacacaaaaacagaaaaccaaacactgcatgttatcactcataagtgggaggtgaacaatgagaacacatggacacagggaggggaatatcacataccagggcctgtcagggggtagggggctaggggagggatagcattaggagaaatacctaatgtagatgacgggttgatgggtacagcaaaccaccatgacaagtgtatacctgcgtaacaaacctgcacattctgcacatgtaccccaaacttaaagtataataaaaattaaaaaaagaaatctaaacacagaaaaggtacagtaaaaatatggtatagtcgattttaaaaggtacacctgtagagtgtgtacttcatgcatggagcttgaaggacttggtgttgctctgagtgggtcagtgagtgagtggtgagcaaatgtgatggcctacgacattactgtacactactgtagaatttatcaatactgttcacttaggctgcactaagtttatgcaaaaatatttttctttcttcagtaataaattaaccttagcttactgtaaaaaaaaaaaaagtgaaaagttaatatttatgtgttctgtgttcaggaaaccaggaggaatggatttggctgaaactggaatacatggatagataaggctagagagataggcaggagccaagccaacaatactaggctcccatcaattgctggggcaggcaagagcaggcatcatcctgagtgtttggagcttcttttcatgttccctaagttggggggtgttggggggatgatacagggggaaattctgattaagacttaacatctattcctttgccttctcttcaagaagtcatacttgatgtccatccctcctggacagggtccgttctgtttgctgctaagctcctttcttatctctcccacctactgaacacgtactgtgttctgggagttttgaatgcatcatcttgtttatcctcatgagatggtctaataatgaagaaagcatgttttggcatccaactcacctgggtatgagtcccagctctgccttttactagctggatgtctttgagcagctcagttccctgttctgtgcttctgtgtcctcatctgtaaaatgggaacgacggctatttcttcagactgccctccctccctccttttctgtctccctccctccctcccttcctccctccctctttcccccttcttcttttcttttctttctctctttctttcttttcttctttccttctttcttttttctttctccttctttccttccttccctcctctctctctctctttatttctgtctgcctgtctttcaacagggtcttgctatattacccaggctggtctcaaactcctggactcaagcaatcctcccagcttggccccccaaagtgctaggattacaggcctgagcacctggcctggactttcttcagacttttcacagggtactagtgagaaaaaaatacatggactctgcttacttaatactgtgcctggcacattgtaagctcttcgcacatgttattgttattattcctcatcctaagggggaagtgcctttgaagggtccacactcctttgttacccaaattgggccaggttgcttaaactgccgttcttcagtagctaacaacaggggtgggagagcctggtcctctgaagtccagctgggcacacggccagtccctggcctgtccctgctcctgctgccctggcaaggcctccctcacccactggggctgcaccagcactggccccagctcagcttcctgtctcccttatcttcctccagcatgtgctctctggagtaggaaacaccaccgcttgcttccttcatttccctttgctcaacgggaccctcattctttaggtctcagtcaaatcccagctgctggcctggtgcccactctgtgattttctacacctcagccacccaggccagatgcagtgtaggccatggctccaacagcagcatttctcttttcttccccacccccatccctgggtttagaatgagaaaaggctcaagttgcccccctcccaacttccctacccgcaacactctttttattttctctgttcccagctccatacttccatgcttttttttttttttttttttttttttgagatggagtcttgttctgttgcccaggctggagtgcagtggcaggatctcggcttactgcaacctccacctcccgggttcaagtaagtctcccacctcaacctcctgagtagctgggattacaggcacgccaccatgcccagctaatttttgtatttttagtagagacggggttttaccatgttgcccaggctggtctcaaactcctgacctcaggtgatccatccaccttggcctcccagagtgctgggattacaggcatgcccagtcccatactttctgagttcaaatcctcgctctgcacttccaagctgtgtgaccttgggcaagttacttaactatttttctgggctttgattttttttttttttttttgtacagaggagcagaggaggattcatcaggttgcccaggttggtccaaactcctgggctcaagggatccttctgcctgggcctcccaaaatgctgggattacaggcatgagccaccatgcccagtttttttggttgttgtttgttttgttttgttttgtttgagacagggtctctttctgtcacccaggctggggtgcagaggcacagacatagctcactgcagccttgaccttttgacatcctgggctcaagccatactcctgcctcagcctcccaagtagatgggaccacaggtgtgtactaccatgcctggctaatttaaaaaaaatttttttgtagagatggagtctcatatgttgccatgctggtcactaatttacaggcatgagccactacacccaggcagctttattttatttatttttttgtctgtagcatggaaacaatgagcatggtctgccccagagaaagtgattaaaggcctagcacatagtatgaatttaaagaatgttttataacatatatattaaacattcaagcatgttggaggtatgtgttaaaaaaatgtattgatggaaagtgatcaaaataatttttgagtcactgtgtgggagttaaattcacaaactttggcaccagagagagagagaaactttcaaattatagcttttgctgtgtgaccttaggtaagtcacttaacctctctgagcctcagtttcttagtaaaatggtgatgctagtgaaacccatttcacagggctagcataagaataaagtaagattatttaagtaaagagccgaacactgtttctggcctacaataagtgttacctataataatgctatcattgtctcactgttcaattttcagggctctagtatatgagaggggtgcttgggaaatagctgttgctgctgctatctgtccatgatggatcttaacctgattagaaaggcctccatgtggctgggcgtgggggctcgtgcctgtaatcccagcactttgggaggccaaggcagatggatcacttgaggtcaggaattcgagaccagcctggccaacatgatgaaaccctatctctactaaaaatgcaaaaattagccaggcatggtggcacctgcctgtaatcccagctacttgggaggctgaggcaggagaattgcttgaatccaggaggtggaggttgcagtgagcagagatcataccattgcactccagtctgggcaacagagcgagactccatctcaaaaaaaaaaaaaaaaaaagaaagaaagaaaaggaaagaaagcccttgatgtaatgagctctgtgtaagataatgtggatgaaagtggacccagaccctacccgcttagatggaaggctcacagcattcaattccaaattggttcaatcgtacactcttttgccctctcttatccatcccaaagtacccttcaagccttcaagggagaaaaaaggcaaagcaaaaatatgcacaacctcactaagaaccagaaaaatgcaaactaaaaccaaagagaaatgccattttacacccaaccatctgataatgccaagggctggcaaggatgtgaagcgagggaattctcatacactgctgggaacgtaaattggcacaacctttctgtaaaacagtttggcaatatctagtaaaactgaagatgcatatactttattactcagaaattccactgtcaagtttgcacctacaaaaactcccacatatgcacaaggactcgagtatgagaatgttcataccagcactgtttgtaatagcaaaaaactggaaaaaacttaagtgttcagcaacaagagaatggatacataaataatgatctattcccaaaattgatttttttttttgagacagggtcttgctctgttgcccaggctagagtgcagtggcatgatcatggctcactgcagtctcaacctcctgggctcaagcaatcctcctacctcagcctcctgagtagctgagaccacaggcacaacccatcacacccagctaattttattttttttgtagagatgggggtctcactatgttgcccaggctggtcttgaactcctgggctcaaatgatccacccacctcggcctcccaaagtgctgggataatacctccccagccggaatattttaaagcagtgaaaatgaatggtctacacatagccacatgaatgaatcttattaatacattaagtgaaaaaagcaaaaggtacagaggaatacatacattttaataccatttatataaagctcaaaatatgtgaaataccactatctattgtttagggatatatacataagtagtgtaagtatacagaaatataaggaaatgaaaaatatcaaatcttcattttcatctgaagtggttacttcaggggctgtggcagggagagagagatgcagctgaggaagagtccatagggggcttcaactatattagcaatattgtatttcttatgcttggtggtggggataggtatgtttgaaatgtaatcctttaagcatgaaataactcttcaaaaatgaaatatttcaggctgtgcacagtggctcaggcttgtaatcccagcatgttgggaggctgaagtgggcggatcacctgaggtcaggagtttgagaccaacctggccaacatggtgaaatcccatctctactaaaaatacaaaaattagccaggtgtggtggcaggtgactgtaatcccagctacttgggaggctgaggcaggagaatcgcttgaatctgggaggtggaggttgcagtgagccgagatcacgccactgcattacagcaagactccatctcaaaaaaaagaaaaaaaaaaagaaaaaagaaatgtttcataatttttaataaaaggcaagacaatataaattggtagttatttaagtcattctacttttcctgaggcccagtgcaggaaaacaaagttcctatccttgttccaactagaccattttgataagctgcaaaaagaaaagactttgatgctatttcttagccagtttgcaacagctgagaggtgagcatggaagctcttgcatatattcagttcagagaatgggtgcttagtttatgtccagagtttgtcccagatttcactatgacgtcagctctccggggagaagtatataaaataaaaagttaaaatccctctcagtcctttacccaatcctattccccagaggtaatctctattgacagtacccctccagatattttccctatgtatatacaaatacacagatacacactgaaagttaattttggccaggtgcagtggctcctgcctataccagaggattgcttgagtgcaggagttcaagaccagcctgggcaacatagcgagaccacatctctagtaaaaataaaaaaaaatagctaggcgtggtggcacagtggcacgtacctttagtctcagctactcgggtggttgaggtgggagaatcacttgagcccgggaggtcaagcctacaattagctgtgattgcttcactgcactatagcctgggcaacagagctagaccctgtctcaaaaaaataataataaattttatatatatatatgaggatgaaattacatatgtattatttgaacagaagtgaaatcttttctttttttttttcagacagaatcttgccgcatgacccaggctagaatgcagtggtgtgatctcggccctctgcaacctccacctcccaggttcaagcgattctcatgcctcggtctcccaagtagctgggattacaggcatgcaccaccatgcccagctaatttttgtatttttcgtagagacgttcgccatattggccaggctggtctcaaactcctggcctcaagtgatctgcccacctcggcctcccaaagtgccagcagcatgctcggaggagtgactttaaagcttttctacttgcttcctagagtaagggacgcattttacactgctatccaaaactcatcatagaaacatacacacacaaaaccaaagcacacatatacaactgagcaaatatttcatgacataacactttctcttactaagggtgacgcgctgaaattttgtattctgtcctatttcattttttaaaaatggtaaccatgacctgctaaattgatttcattgtccactaataaattatgacctcagtttcaaaaagattgctttaggtaaccaatcatcttctgagatttatacagattgctcataattctctcctattttttaaaaacatgctgcagtgaactgctttacactcattttatgactacttctgagaccaagatcccggattatgtaattgttatttacttaaaattctggtaaaatgtagccattatactggaaaactaaattttaatcttggatctgtcaccaccatgatatataaactttgggcaagtccctgcacctctctggacctcaatctccccatcagcaacctgctgatcctactcccaggagtgtgctctaagttgaaagtagatgccccaccccctgagtcagcgccggcaggacttctcaccaagcccttctcccccttttccgctccctgttcctggttcctaggaagcagcccaaggagaagggaaaaggcaggtctgggcaggagggagcaatgaagggcggggcagagggagggcaggagggaggccggccccctagtaggaaatgagacacagtagaaataacactttataagcctcttcctcctcccatctcctggcctccttccatcctcctctgcccagactccgcccctcccagacggtcctcacttctcttttccctagactgcagccagcggagcccgcagccggcccgagccaggaacccaggtccggagcctcaacttcaggatgttgacaacattgctgccgatactgctgctgtctggctgggccttttgtagccaagacgcctcagatggtgagtcgggggcacatctcctgcctcaggatggttctggagaatctcagtctatctgggcacatggcaagaccacaggagagcttatctcacagcatctgtgtctgcagctggctagatctctctacagggcaggcagagtcttggggactggttcgtgtcccaaagccaaggtgagttagtacatttaagcccctgaaaagggggagatgaaagaggctaggggaaacaggatgactggaaacatgagaaagaaaccagcagagagggtaggagaatcagccccagggagaggggagaaaggggaactgagggtgatggtagataggggtacatctaggggagacgggaagaggctcagaagagaagagaaatggagggaatgggaagaccctgggaaaactgatggaagaagtgggggaagagtggggcagagagaggttaggggaggctagggaaaatggaaggagactggtcgcagctggtggaactggggagaaagagatgctgtgcctaatagaacttatgggcgatcaggctactgaagtggccctgtttaagcagaaaagggagttattaccctccattataattgcacaggggcctcctttcccctctctcacaatccccgtaacttcagtctccccctcagagaggcagcaaataataaccagtattcaatgagtgctcactatggttaatacatgtattgacccatttaacttgcacaaacccctaaaggtgggtaatattattactatctccattttatgaggaggaaactgggtcacagagtagttaaggaccatgtctagggttatccataaatatacttattcacatctgcagatacaaagcacaacttctcaaatgcaaacacagacaggacccactcacacacacagatttacaaccccggactcatccaaatgtgctctgggcatcaactctgtgccagcctcttttctgggtgtaggaagcagagattaccaagcatggttccatagcctagaggagtccagtgtggcctgtgtgtgtttggagacagccaggtagtatcccgtgagatacacactaatatatggtggtctgggatcactgaaacagacacactgtgtctcgtggggcatcagaaaaaaatttccaagaagagggcaactgagctgggtctttttttctttgcttttctttcttttttcttttttttttttttttttttttttgagatggagtcttgtgctgtcacccaggctggaatgcagtggcacaatttcagctaactgtaacctccaactcccaggttcaggcgattctcctgcctcagcctcctgagtagctgggactacaggcatgtaccaccacgcctggctaatatttgtatttttagtacagatggggtttcgccatgttggccaggctggtcttgaatccctgacctcaagtgatccgcccgcctcggcctcccaaagtactgggattacaggcatgagccaccgcgcccagtctctgagctgggtcttaaatcatgaataaacttcgccaggcagaaaaagggaggcagagcaatcctgacatgctattcatgtgtcagccaaaggcagcatgaggaatcccaactagtttgatatataagcagcgggaagcggccagaaaaggcagcaggggccaggtctctagcagccttgaatgccaggctaaagactctggacttgatcctgtggggaggcagtgtagcagaatggctgagtgctggacttgactgcctacgtgcaaaccttggctctgctacactatctctgtctcagtttcccatgtagactggggttaataatagtagctattgcattaagccactggggaaaggcacaaagataataatgtatgtaaagcccattgcccaggttataataagcactgaatcgacattggctatgattatttttgattaatgaaggggagggggttatggcactggaagattttaagtaggaaaaggacatgatctcatccctgggtcaggtggaggtcggaatagagaacggggagatgaagtagaaagttactaccccagtctagatgagacggatgaatcctgaatcagggcagtggaagaggagatggagaacaggcgatggaattggaattttattcaggtcaggatttgttaaccatttgttccgttggttaacaggaaacggggggagggagagccgagggtgaaaaaggaggcagaaaggagtgtctcttccactgcaggcctcagtttcctcatctgtaaaacggagataataatccctgtcctgtcctcctggcagagttactgtcagcgtcaaacgggagaagcggtgggagggcacattatagtttatgaagggtcgagaaggcgggcggccagcctcgaggtagggggttattatcttccgctgcccgccgccccctcccacgccggcccaggctgaagctgactctgcccgcaggcctccaaagacttcatatgctccagatctcctacttccgcgacccctatcacgtgtggtaccagggcaacgcgtcgctggggggacacctaacgcacgtgctggaaggcccagacaccaacaccacgatcattcagctgcagcccttgcaggagcccgagagctgggcgcgcacgcagagtggcctgcagtcctacctgctccagttccacggcctcgtgcgcctggtgcaccaggagcggaccttggcctgtgagtaggcgcgcagcgggggcggggtctgggcggggctagtgggggcggggcctggcgggtgggggcggggcctggcggatggaggcgggctgggacttgcagggacccggcagccactggagctcggtggcgcctgggcctttgaagattgctgggtgggggctggagagaggcagttgtccccgctaagaaagccccgactcgggcggtcgtcctgctggcataacctcttgggatagaccctgttggaaggccctgacaccgtgacgtcgaaggtccccagaaaactcctcacccctcgcctcacagtcctccaactccttttcttcatagatctccgtccttcccttcccacagcccccagcacttcaccccccaccctccagccacttctcatacaagctgatgacttcgctcttagctccactcatgacccgaactcttcccccaaagaccccaagttcttctctcaaagccccactccttccccgtcacaaccctaactccttcttctcaaagaccccaatttcttttctcaaagcaccaagcaccactccgtcccccttcccccaccatcatggcctttaactcctttctctcctagtcccccaccccaccccccttttttttttttttttttttttttgagacggagtcttgctctgtcgtccaggctggagtgcagtggcgcgatctcggctcactgcaacttccgcctcccgggttcaagcgattctcctgcctcagcctcccaagcagctgggactacaggcacccgccaccacgcccggctaattttttgtatttttagtagagacggggtttcgccatgttggccaggctggtctcgaactcctgacctcaggcgatccacaagcctggcctcccaaagtgctgggattacaggcgtgagctgccgcccctgccccagcctcaccccctgttttttttttctattacagttgaacaaggcctgacaattcccttttttcatcacagtccctggccccttctttcttagcctctaacaggctaaccccaaacccctcctcacagccccaggcccttctccccatagttccctgacctagactcccctctcctcacagcactgactcttgccttctcatgttcttttccccttggtgggcctcgccccacacctggcaccctctctgcacagtcccctgaccctgactgtctatccacagttcctctgaccatccgctgcttcctgggctgtgagctgcctcccgagggctctagagcccatgtcttcttcgaagtggctgtgaatgggagctcctttgtgagtttccggccggagagagccttgtggcaggcagacacccaggtcacctccggagtggtcaccttcaccctgcagcagctcaatgcctacaaccgcactcggtatgaactgcgggaattcctggaggacacctgtgtgcagtatgtgcagaaacatatttccgcggaaaacacgaaaggtatgatgggacggggcccaggcctgcaagctggggagagggcgggttccagacaaatggatggacctgaaggatggatgcctagagcaacaagaggcccacagctgggggtttgggacagaacacacgcagcttcagtcagttggtaaacgggtccctttcctctggggcagaaacgctttggggtttgactcaaatcatggactccttgggggcctattcttcgggctaactctttgcatgttctgcagggagccaaacaagccgctcctacacttcgctggtcctgggcgtcctggtgggcagtttcatcattgctggtgtggctgtaggcatcttcctgtgcacaggtggacggcgatgttaattactctccagccccctcagaaggggctggattgatggaggctggcaagggaaagtttcagctcactgtgaagccagactccccaactgaaacaccagaaggtttggagtgacagctcctttcttctcccacatctgcccactgaagatttgagggaggggagatggagaggagaggtggacaaagtacttggtttgctaagaacctaagaacgtgtatgctttgctgaattagtctgataagtgaatgtttatctatctttgtggaaaacagataatggagttggggcaggaagcctatggcccatcctccaaagacagacagaatcacctgaggcgttcaaaagatataaccaaataaacaagtcatccacaatcaaaatacaacattcaatacttccaggtgtgtcagacttgggatgggacgctgatataatagggtagaaagaagtaacacgaagaagtggtggaaatgtaaaatccaagtcatatggcagtgatcaattattaatcaattaataatattaataaatttcttatatttaaggcattgttatctcctccactttgcaaaatttctggaaaagtaacctatacccatttcttctgcttccttatttctcactcattctttttttttttttttttttttttgagacagagtcttgctctgttgcctaggctggagtgcaatggtgtgatctcagctcactgcaacctctgcctcccggttcaagcaattctcctgcctcagcctcccaagcagctgggattacagatgcatgccaccacacccagctaatttttgtatttttagtagagatggggtttcaccacgttggccatcctgacctcgtgatccgcctacctcggcctccccaagtgctgggattagacgtgagccactgcgcctggtcttctcactcattcttagacccagtgcaatctgacttctctataaactactctgagatcaccagtaacctctaattgtcaaaccatcaccctacatggtatctgcaaatttgcggactagaactctctttttgccttaacttctgagataccatacttcaatttttaaaactgttctgtctactttttttcaatccctttgactatgtcatcttacacgattcaccctggaaatgctggcttccttagaattccattttttggttccttttgttcctgtttgaactataccctttctaggtgacctactgaccttcatggctgcaaatactatctacctgtggtttccatggagaagcaatataattttatctttaagagcatgtgttttgtcggccaggcgcggtggctcacgcctgtaatcccagcactttgggaggccgaggcgagaggatcacttgaggtcaggagttcaagacaagcctggccaacacagtgaaaccctatctctactaaaaatacaaaaattagctaagtttggtggcacgcgcctgtaatcccagctacttgggaggctgaggcaggagaatcacttgaacccgggaggcagagtttgcagtgagctgagatcacaccactgcactccagcctgggcaacagagtgagattctttttttttttaattctaaaaaaaaaaaaaaaaaaaaaagagtatgtgttttgtcatcagacttaagttttacttctttgaactagaaatttaacttcttcaagtctcagttttttttttttttttttttttttttgagacgaagtctcgctctgtcgcccaggctggagtgcagtggcgggatctcggctcactgcaagctccgcctcccgggttcacgccattctcctgcctcagcctcccaagtagctgggactacaggcgcccgccactacgcccggctaattttttgtatttttagtagagacggggtttcaccattttagccgggatggtctcgatctcctgacctcgtgatccgcccacctcggcctcccaaagtgctgggattacaggcgtgagccaccgcgcccggcctaagtctcagttttttttgttcccaaatggtattaataaaatataccaaagggtctaagaaaaacaatacccaattcataaaggcatgaagagtattaaataaaagtatatatgtaaaataatatgccaagcgcaagctgggcacggtggctcatgcctgtaatcccagcactttgggaggccgaggcgggcggatcacaaggtcaggagatcgagaccatcctgactaacacagtgaaaccctgtctctactaaacaaaaacaaaaaattagccgggcatggttgcgggcgcctgtagtcccagctcctcgggaggctgaggcaggagaatggcatgaatccgggaggcagagcttgcagtgagccgagatcacgccactgcactccagccttggcgacagagtgagactccatctcaaaaaaaaaaaaaaaaaaaaaaatgccaaacgcaatgactggctcacacctgtaatcccaacactttgggaggcagaggcaggaggattgcttgagctcaggggtttgagaccagcctagacaacatagtgagaccctgtctctacaaaaaaaaatagaaaaaattagctgggcatggtggtgtgggcctgtagttccagttactcaagaggctgaggtaagaggattgcttgagcccagaaggttgaggctgcactgagccatgatcgtgccaccacactgcagcctggcaacagaccaagaaaaaaaaaaaaagatagtgtatgtatagtcagtaaatacagcagtggcttctgatctccagacctctcatttgcattgattctttaaaatcatctctaccttaatgttctgtagacatttcaaaatcaacatgttcaaaatcaaatttattatctatctccccaaatctgctctctctacttctgatgtttactgttcattaatggataacagaataaccatcaaatcatgtaagtggagagaactcagtgttaacctttatttactccctcttatttatccccatctaccaactacagtatctataaaacacattcactcctttctaccccattgcttttgttcaagatatcataattcctctctttctttgtggtaaacatgaaggtgtaccatccagttctacctccaaagaaagacttcctgttggccgggcatgatggttcacgcttgtaatcgcagcactttgggaggccgaggtggggggatcacctgaggtcaggagttggagaccagcctggccaacatggcgaaaccctgtctctactaaaaatacaaaaattagccgggcgcggtgatgcacgcttgtaatcccagctactagcaggggctgaggcaggagaatctcttgaacccaagaggcagaggttgcaatgagctgagatctcgccactgcactccagcctgggcaacaagagcaaaattccatctcaaataaataaataaatacataaataagaaaaaaaagacttgccgttcagctatagggggaatagccagcagatagcttccgcttgcttcagttctttcaatgtctgcctcagctgtagaggacagtcctgcacaagatcatgcccatcccagggctgccctcactcggtgcctaagcaaggcaggggtataaaagttcggtcattttggccaactgcaggacaactctgagaataggttggattgacaagggctagccagggctggaaatattcactccagagctccctgccagggaggctgggtctttgtcagatctgcattgccgtttgacttctctcttagctcagccctacttcttccccctggtaagcatcttgcacctcaaactctgtctcagcctctgcttccagataacccaacttgtgtgtgtgtgtctctctctctttcaaaattgagaaattttctcaatcttgtctggaccatggcagcagcctcctcctaagaaattgcctctaatttctccatattttaattcatcttctacatggcagtaagaaacacagatctaattgtgtcattattccgttttttgttgttgtttgttttttgttttttgttttgttttgttttgttttgagacagagtctctctctgtcacccaggctggagtgcagtagtgtgaacttagctcactgcaacctctgcctcacaggttcaagcaattctcctgcctcaacctcccgagtagctgggattacaggcatgtgccaccacgcccggctaattttttgtatttttagtagagtcggggtttcaccatgttggtcaggctggtcttgagctcctgacctcaagtgatctacccgccttggcctcacaaagtgctgggattacaggcgtgagccaccacgcctggactgttttttaaatttctcattgagttaaattcagaatcctcaaaatgacattcaaggccttgcacaatgtggccccaacctaattttctaatttaattttaatttaattttattttattttattttgagatggagtctcactctgtcacccaggctggagtaaagtggtgcgatctctgctcactgcaacctccacctcctgggttcaagctattctcctacctcagcctcccaagtagctgggattgcaggcatgtgccaccacgcccggctaatttttgtatttttagtagtgacggggtttcaccatgttggtcaggctggtcttgaactcctgacctcatgatctgctctccttggcctcccaaagtgctgggattgccggcgtgagccactgtgcccggcccctcaaattttattttctaccatttctctttagccactgtgccttagattatttattttaaaagcatatttttaaatgacggaagtggtacaacaacagcaataacagagaagtttacaaagaaatttcataaaggaaaaacggaacgcctcctgctttctcattctccccaaatccttactccagaggtatgctaagattattagttgcaagcaacagaaaccaattctgccaacttaaggggaaaataagtatattggaaggttattaagtaatcctcagagttgatgggaaagccagataatcaagctcagaaagtagaaccagggaccacagccaaagtcacaccacaggaatggtattaaggatgccacagctggaagcactacctccatcaccaatgctgctgccatattaaaggaattctcctctgaccctgtgtctttacatcatttgttcaagagtcaatatcctgagtggaagcagccaaatgaccaagccttgatcatgttgcttttgccttagctgcaagtgcaggggggaaaaggaaaactttagatacctttgacttctcttgtgggaggtgagaacctgtctcccattaagactcacacagaggaagagatttcagatgctgggcaaccaaaacaggtacaggtgattttaaagaattgatgcaaatgagaagcctggagatcagtagccactgctgtatttactaactctacatatattatcttttttttgagacagactcttggtctgttgcccaggctggaattggtggcacgatcatggctcactgcagcttcaacctcctgggctcaaaaaacagaacaaaagaaaaataaaatagaaaagcaaaaacaacaaaaacccataaatgttcactatatctcacatcattaatttatttactcgtttaataaatgtttgtcagaaacttccatatagaaggctttatgttatgtactttggaagacacaaaacgattaggatatgatccttctcaaggagcccagtcttttcttgggaagataaaacatacaaaagagaacaacacaaggcaagatgcattgtataactagaagaaacacacaaataaaaatgtgatgttatgtggccgggcatggtggctcacgcctgtaatcccagcactttgggaggctgaggtgggcagttcacctgaggtcaggtgttcgagaccagcctggccaacatggtgaaaccgtctctactaaatatacaaaaattagccaggcatggtggcacgtgcctgtagttccagctactcaggaggctaaggaaggagagtagcttgcacccaggaggcagatgttgcagtgagttgagatcgtgccactgcactccagcctgggcgacagagcgagactccgtctcaaaaaaaaaaaaaaaaaaaaaaaaaaggaaagaaagaaagaaaaatgttatgctctgatttactcttgtagctatcatttacatattgctatatagtttttggaattctgtaacttgcgtttatcatttaatactctctttggtcttgtaagatagatataatcattttagattaggagacatgtttagggagaataagaaagttaataactgatatggtttggatgttttgtccctccaaatctcatgttggaacgtgacctccattgttagagatgggcataatgggaggtgtttgggtcatgggggcagatccctcatgaatggcttaacaccatcctttagtgttgagtgagttcttgttcagttagattacacatgagatctcgttgtttaaaaggatctgagacctcccctcctctttcttgcttccttctgtctcatcttatatgcctgctccccctttgccttccaacatgattgaaagcttcctgaggcctcaccagaagaagatgctggtgccatgcttcctgtacatcctgcagaagtgtgagtcaaaaataaacctcttttcttttataaattagccacttgcaggtattccagtatagcagcacaagaattgactaatatagtatcagagctaggattcaaacccgtgcctttgtgttctaggatttatgctttctctcctctactaaaactgcaggaatcagaggaatctaggggagaaacatggtatttgtgaattggtgagatatgaccatgcccagataggaaagatagacagaacagattcaataatgaaaataggaaaaagcagagtaaattttagacatttcttaaagaagatacaccagtggccaataagcacatgaaaagatgcccaacatcgttatagtcattatggaaatgcaaatcaaaaccatgagataccacttcataccatcaagaatggctataggaggatggatagaatcaatattgtgaaaatgaccatactgccaaaagcaatctacaaattcacgcagtccccatcaaaataccaccatcattcttcacagagttagaaaaaacaattctaaaattcatatggaatcaaaaaagagcccacatggccaaagcaagagtaagcaaaaagaacaaatctggaggcatcacactacctgatttcaaattatactataaggccatagtcaccaaaacagcatgatactggtataaaaataggcacatagaccaatggaacagaatagagaacccagaaataaacccaaatacttatagccaactgatctttgacaaagcaaacaaaaacataaaagtggggaaaggacacccttttcaacaaatggtgctgggataattggttagccacaggtagaagaacgaaactggatcctcatcttttaccttatacaaaaatcaactcaagatggattgaggagctgggcgtggtggctcacgcctgtaatcctagcactttgggaggccgaggcgggcagatcacgaggtcaggagattgagaccatcctggctaacacggtgaaacccatctctactaaaaatacaaaaaattagctgggcgtggtggcgggcgcctgtagtcccagccactcagaaggctgaggcaggagaatggcgtgaacccaggaggtggagcttgcagtgagctgagatgacgccactgcactccagcctgggtgacagagcgagactgtgagactctgtcacaaaaaagaaaaaaacacaagatggattaaggacctaaacccaagacctgaaactgtaaaatttctagaagataacattggaaaaacccttctagacattggcttagccaaagatttcaagacaaaaaaaccaaaagcagttgcaatataaataaaggtaaatagctgggacctaattaaaccaaagagcttttgcacggcaaaaggaacagtcagcagagtaaacagacaactcacagagtgggagaaaatcttcacaatctatacatctgacaaaggactaatatccagaatctacaatgaactcaaacgaatcagtaagacaaaaaaaaaaaaaaaaaaaatcaatcccaacaaaaagtgggctaaggagatgaatagacaattctcaaaagaagatatacaaatagccaacaaacatgaaaaaatgctcaacattactaatgatcaggaaaatgcaaatcaaaaccacaaagcgataccaccgtactcccataagaatggccataatcaaataataaaataatagtagacgttgacgtggatgcagcaatcagggaacacttctacactgctggtgggaatgtaaactagtacagctgctatggaaaacagcgtggagattccttaaaaaactaaaagtagagctaccatttgatccagcaatcccactactgggtatctaccccgaggaaaagaagtcattattcaaaaaagatacttgcacacgcaagtttatagcagcacaattcaccattgcaaaatcgtggaacaaacccaaatgcccatcaatcaatgaatggataaagaaactctggtatatatatatgatggagtactactcagccataaaaggaatgaattaacagcatttgcaatgacctggaggagattagagactattattctaagtgaagtaactcaggaatggaaaaccaaacatcatatgttctcactgatatgtgggagctaagcgatgaggatgcaaaggtataagaatgatacaatggactttggggacttggggcaaagagtgggaggggggtgagggataaaagactacaaatatggtgcattgtgtactgcttgggtgacgggtgccacaaatctccaccaaacaacttactcatgtaaccaaatgccacctgtacctcgataacttatggaaaaataaaattttaaaaagaatggctataggaaaaaagacagacaataacaagtgttggcaagaatgtgaagaaattggaaccctcatacattgctggtggcaatggtatagcactttggaaaacaatttgacagttcttcaaaaagttaaacatagagttattgtgtggcccagcaagtccgctcctagtatatgcccaagaaaattgaaacatacatccatgcaaatacttgtacatgaatgttcacagaagcattattcctaatagccaaaaatggtaataatccaaatgtctgttaattgatggagaaacaaaatgtagtattttaatacaatggaatattatctagccatgaaaatgaggtactgacacatgttacaacacggatgagccttaaaaacatgataagtagtccgggagcagtggctctcgcctgcagtcacaacactttgggaggccaaggcgggtggatcatgagatcgggagttcaagaccagcctgaccaacatggagaaaccccgcctcttctaaaaatagaaaattagccgggcatggtagcacatgcctgtaatcccagctactcgggaggctgaggcgggagaatcacttaagcccaggaggctgaggttgcggtgagccaagatcgcgccattgcactccagcctgggcaacaagagtgaaactccatctcaaaaaaaaaaaaaaaaaaaatgataagtaaaagaagccagtcacaaagaaccaggtattatatgattcaacacacgtgaaacatccagaataggcaatctgaccaggcacagtggctcatgcctgtaatcccagcaatttgggaggccaaggcaggtggatcacaaggtcaggagatcgagaccatccttgctaacatggtgaaaccctgtctctactaaaaaaaaaagtacaaaaaagagctgggcatggtggcacgtgcctataatcccagttactcgagaggctaaggcaggagaatggcgtgaacctgggaggcggaggttgcagtgagtggagattgcgccactgcactccagcctgggcaacaaagcaagactctgtctcaaaaaaaaaaaagaaaaaaaaatagcaatagctgtttaagtcagtggcctgcaaaacatgttaacaattaggtcaattccttctttgcgcttcctcaatccatagtttgatctatcttcctccaaatctgctctgtcactcaggctggagtgcagtggtgtgatcccagttcactgcagtctccatctcgcaggctcaaacgatcctcccacctcagcttcctgagtagctgggactacaggcatgcacctccaagcctgcctaaatttgttttgtttgtttgtttgtttgttttgtagagtcagggtttcaccatgttgcccaggctcgaattcctgaactgaagtgatccacctacctgggcctgccaaagtgctgggattacaggcatgagccaccacacctggcctgaacacgcttatactaatggtgaaataatgttgggtagctgtaagtggcttgcccaaagttccacagtgatgtggtacaagaactggcactagagcttgggacttctgacttctgatcctgagctattgctgctacatcattccatgagaggcattaggaatcataggttaaagaggtaaggtactacttggagggattctctgaaaatttttgcccatgtccaaaagcaggagaggtaagtaatcagggaaacagtgggatgaataactctgaccgtttagggagaagatatgatcctcatttccaggagtttctacacagggtgaagagtgaatggaaggttcatctgcttatgcttacgtatgtgaatacatgttcatagctacatgaccttagataagtcagtgcccctctctgagagggagtttgtaatctctgagatatctaaggtatctcccagctctgataactaggattctacattcctaagtccagatggctgacaggacaattgtaaaggtcctagaagttccattcctctttttgggaatgatcttagaatgtttggcttgggtcagttacgtggcagccagactattagagctccagttggagtttacaagagaaataaacaaatctgaaataaaggtaaacaaatgactccctggcatattctaaaagtatccttctgggtggcttggcttactggattccccatcttttaattcagttcaacacgtgtgccttgattttatatctctgccaggtggcctgaggtttaggttttggaccgcattctttttccaactcagccaactgttgctgaggactgttttatgcaaagaattgtgctaactgctagcagggatgcaaaagtgggtaaaacatgatctctgcccaggaactgatagtctagaaggagaagcatacaaagcagtttattttaacacagaaggaatgaaaagattcaaagtaattataagctatgtactgaaagaaagagatctgggaaggctacacagaggccatagatttcatctggggcttgaagaagagaattacagtaggtgaaaaggggaaagatgtttctcctttcctagactaagatctttgagggcagagattacatcttatttatctctgtgttcctgatacccaacatagtgcctggcacaaggaaagagtccaatacatgtgttttgaatcaatgaataatgagtggattctagactgatataatagcacaaagacaaagtggataaaagtgcaccttatgtttggggaatgctaaatggtctgatgtggttgctccgaatattggttatataaggaaatgttatgggaaatcaaattttagtaccagattaagaatgccatgctaagaagttatacttagtctataggcaatagttaactatttactcctctaggacaaaatacccttgggttgtgggaagtcagggaccccgaacagagggacctgctgaagccgtgacagaagaacataaattgtgaagatttcatggacatttatcacttccccaatcaatactcttataatttcctatgcctgtctttactttaatctcttaatcccatcatcttcataagctgaggatgtatgtcacctcaggaccctgtgatgattgcgttaactgcacaagttgttcataaagcatgtgtgtttgaacaatttgaaatctgggcaccttgaaaaaagaacaggataacagcgacgttcagggaacaagggagataaccattaggtctgactgcctgggagctgggcaggacagagccatatttctcttattaccaaaaatgggtaagagaaatatagctgaattctttccccagtaaggaatattaataattaacagccctgggaaaagaacgcattccgggggggggcctctaaaatggccactctggaggggtgtctgccttatgcagttacagataagggatgaaacacaccctggtctcctgcagcgtccccagacttgctaggattaggaaattccagcctggcgaattctagtcagaccggttctctgctcttgaaccctgttgtttatcaatgacaatgcatgcacagtgggacatggaacttcattaataattctagtttcgccctgaccttgtgatctcgccctgaccttctgccttgtgatcttttgttgcccttgaaacaagtgatctctgtgacccacaccctattcgtacactccctcccctttgaaaattgctaataaaaacttgctggttttacggctcagggggcatcacggaacctgccgacatgtgatgtctcccccggacacccagctttaaaatttctctcttttgtactctttccctttatttctcagaccagccaacacttagggaaaatagaaaagaacccacgttgaaatatcgggggctggttcccccaatacccttgttcatctttgtatccttagtatctacaacagtgccaggaatttagaagttagtcaataaatggctggatgaatgaatgaattgaagagttttgaggaaggaaattatttcatccaatctgcaccttactttactgataataatccctcgcctttttgtacaattttgtagtcacagaaacattttatcctattatgtcatgaaaaattttattgatatgctcaaaaagcttattaggaaagaaaggcagatattattatcatttcctatagatgttattattctcatttcctggcaacgttattattctcacacccagtaaaaagaaaccaaaactctatttcttctaatatctcttggtatatccgatgatctgttgtatgtgtactggcatataacagggttctcatgggtagccttaatcttgcatcacactcactataatcaggatttctacatatcccaaaaaatagatccaactcgcaatgcagggatattgtactgattacttcatggggatcctggctgtaccataccccacacagcagaagcttaatcaattcttagacatttctgttctttttcttaagcttgatctctctcaacatcaacgaacttatctctcttccttctctttcctctcacaaccttgcccccttttcccacccaaacaaaaaacaaaacccattattttattaagcctttcatttttcagtatgtttatttttctcagcaaaacaaaagccctgtagtttttcttatttccttaaacatggtgttttatttcatccaaatgcaagtgaagaggagattagatttggtttgtggaattccagggaacagattaatgaatgagaggaagtcagagagaaataaatgttagtttaatgtaactttctgacccagcaattcaataatggaactggctgtttcacagagtagtgaactccctgttactggaagtatttggcatgtcaagtccaacttctgacctctaaaaccgcatgtgaccgtcctacatatgttcaaagatgatggtcctgttctcctaaatcttttcttctttttttgagacagagtctcgctccgtcgccaggctggagtgcagtggtgtgatctcggcccactgcaatgtctgcctcctcagttaaagtgattctcctgcctcagcctcctgagtagttgggactacaggcacgtaccaccaggcccagctaattttcatatttttagtagagacagggtttcaccatgttggccaggatggtctcgatctcttgacctcatgatccacctacctcagcatcccaaagtgctgggattacaggctgtgaaccaccgtgcccagcaatcttttcttctccagattaaacatcttactttcttcaagggttccttatttgatgtggcagttcagtaacctgctattgttcttctggacttgttacaatttgtcaatttctcatgcatttatttaaaaaaatttattgagtcgggtcactagaattactaaataagaaaaagaaaattattgagtgacttctatggttcagacgctgttttaggacgtgggaatagagcaatatagcagagaacaaaaacaaagtctgtcttagaagctacagtttactgggagggacagaccctaaacaaataatttttttttaatgtcagagataattagtaggaaataggtagaaaaataaggaaggtcgaagggagaataactgagttgctgttttagacagcataatcagggcaggcctctggaataagatgacagttgagcagagatatgaaggaagtgcaagagtggccaggggaagaacaagccaatttagatagaccgaacaagtgcaaaagctctgaggagtaagcttggtttatttcatgaacaaggaggccagtttatctgaagtggtacaggcaaagagaagagaaagagcaggaggcaaataaccgagggcctaataagccaattatctgtactttgctatttgttctgagtgagatggaaaggcattggaggctttcgagaagaggactgacgtgatttgacttgcatttgaaaagcatcactatggctaccatggggggaaacaaagtttaaaaggcaaagaaatactcagggacctccaaggatactcatacattcctgttaggaggcaataatatgggtgaaaaatgatggtggcaaggacaagggtgataccactacttacccattacccatcagaatagtcagaaagaaaaagacaaacaaggaaggaaagaaaagacagtattggcaaggatacaggccaattagaactttcctacactgctgttggtaaggtaaattgatatgaaacaaccactgtttagaaaaccgcagtatctactaaagttgaacatctgcctcctaggcatatgcctaacagaaacgtttacctatgttcactgaaagacatatacaagattagtcatagctgtaagaattaaagaaagaagagagaaacacgaagggcggctcgacagtcaacagggacaggtttattctgaataaacttgagtggggcagctggccaagttaggtcagagccacactctcttacagactaagtgtttttaaggattcagggtgggagaatttatcagaggcttggactgcttctgtgtttctttgttgtgcttatctgggagggaaagttgtgtgtctgttcccatacatctttctgcagctgcaggcatatcccccgggttgcttttagcttccctatcttagtgcacctgaagggaaaggaatgtgcttattagggcctactgttttactgggagccatcgtatgagggtgaagtttggcagttacccaggagactttccccccacctccctctgtacccaagctgtcttatctatgttttactgtctgctctttctatttgtacttagaagagagtgatttccttgaaatgcacgaggctagaaagggagctggaacttaaagtggcagtgtttgttcgagatgacagtgctcctgctctgtcaatagcagtattctttgtaatatccccaactaaaaagtacccaaacaccatcaagaatagaataatgaaacaaattatactatatttacataatggaatatacaacgagagtagaaaaacttaaactacaagtcttaatataagtgaatgtcacaaatataatattgatcaaaagaagccaaacacaaaaaagtataaactatatgattacatttatataaatttcaaagacacacagaactaacctgtggtgttagaagccaggatattggttacatttgggaagctaatgattagaagggagacatgagggcttctgaggcaatgccctgtttctttctttcttttttttttttttttaagatggagtctcgctctgtcaccaggctggagtgtagtggcgcaatctcggctcactgcaacctccacctcccaggttcaagccattctcctgccacagccccccgagtagttgggcctacaggcgcatgccaccacgcccagctaatttttgtacttttagtagagacggggtttcactgtgttggccaggatggtcttgatctcttgacctcgtgatctgcctgcctcagcctcccagagtgctgggattacaggcatgagccaccgcacctggcctgccctgtttcttaatctggatgctggctatatcaataggctcactttgtgaacattcactaagttgtacatttataatttgagcactttcctgtatcagtgttatgcctcaataaagtttacattacaaaggaatgactcagaggttttgatctgtgcaactggaggctataattgacatttattgaaatggggaagctatagaagaagcaggttttggtgggaaatgcattcattatgtacatactacatttgatatttattagacatccaagttgaaatgctgatagaatgcagttggtatacaagtctgcagttgagggaaatgtctaggctgaagacctaaatttgagagctcactatatagataacatgtaaactcataaagctggatgggatcacctaaggaatagtctagacagagaaaacattcaagtactaaaccctgaggacgccccaacatttaaaggctggaaattgaggagaaaccagtaaagaaaactgagtagccagtgaggtgtgataagagctgagagagtggaatctcagaagccaggtgaaaaaagtgttctaaggaggaagtaaccactgtaacagatacagcagatagtggaataaggtaaggactgatcatcggttattgatggagatcactggagaccttgataaacagcagttttggtggtgtggtagggacaaaagcctaattagaatgagctcaagaaacaaactaatttgagacagtgactataaataactcttttgaggagtttggtttgttttacagaagaacagagaagtaagatattaaaaagaatattaattaaggatatgaagcagtgttgggttaagtaactaaggaggcttatgggatcaagaaaagttttttctcttaataaggtagataataaagtatgtttgtacacttacagggataatcaatagagagggaaaatttgatgacacaagaaaaagagagggcagtggctggagtgatgtcctggagcaggttataaaagaggttagactccaaggcacaaatggagagaccaacttagctaagatcatggacagttcctctagggaggaaagagctagagaaagggatcccttaaatctgtacgtgagccaagagaaattgcaagctcactaccaagttgcacatgtgcttggtaaaaagaaagcttggtaatggctttgataactcaactgtaatataaatcaccatctgactgtcagactaaccccagagtggcatggggtagattcaaacagcctagcaaagactctgaaaatgaactgacactgcaaccacccacagcaggtgagacaaagcttgtagtctgaaactaattgagttatttgcctgctaaaataaactagtcaccatccagataatttaaacaggactcagagtcccacaatctaacactcaagatgggcaagatacaatccaaaattacttaatatacaaagaaccaagaaactgataaatgtttaaaggaaaagaaaacaaatagatgctaatccccaaattatttagatgttagaattatctgacaaaaactttaaagtagctattataaccatcccccatgaggtaaaagttaaacatccttgaaataaatagaaaggtagaagttcttagcagagaaatagaaattatgaaaaagaaccaaatagaaattatgtgaagtaaaaatatttgctgcagagctcattagtagaatggagataacagatggatgaatgaatgagtgaatttgaagatagatcgatataaattattcaatataaagatcatagagaaaaaaatattttaaaaatgaacagtctacagatataccatcctgaatgcacctaatcttgtctaatttttgaagctaggcagggtcaggcctggttaggatttggagggagaccacctgggaatactgggtaatgtaggctgtcaattaaaaaaatgtttttaaacaatcagacacctactatgtaccgataaaattttgtaataaaaaaattcaaaaagtaaacgagaataaataagaataaagaatgtgatgttggccaggagtggtggctcacacttgtaatcctagcactttggaaggccaaggtgggtggatcacctgaggtcacgagtttgagaccagcctggtcaacatcatgaaaccccatctctactaaaaacacaaaaattagccaggtgtggtggtgcttgcctataatcccagctactcgggaggctgaggcaggagaatcacttgaactggggaggcagagattgcagtgagctgagattgcaccattgcactctagcttgagtgacagagcaagagtctgtctcaaaaaaaaaaaaaaaaagaaaaagaaaagaaagaaagaaagaaaaagaacatgatgttttagatatatattaaaaatagtctgggcacagtggctcatgcctgtaagctcagcactttgggaggcagaggtgagcagactgcctgagctcaggagttcgagaccagcctgggcaacatggtgagaccctatctctactaaaaatacaaaaaattagcacagtgtggtagcatgcacctgtagtcccagctactcaggaggctgaggcaggagaatcgcttgaacccaggaggcagaggttgcagtgagccaggattgggccactgcactccagcctgggcaacagagtgagactgcctccaaaaaaaaaaaaaaaaaaaaaaaaaaattaacagagcctcagatacctgtggaaaaatatcaaaagctctaatattggtgtcatcaatatttctgaaatagaggagaaagagactgatgtggaaaagtatttgaagaaatgatggctgaaaacttcataaatttggttaaagatacaaatttacagaattgtaaagctcagtgaaccccaaaaggataaaagcaatgaaaaccccacccaccctaatcaaacttctgaaaaccaaatattaggaaaaaaattttaagagtagccaccaaaaaatcacatgttacatatgggggaacaataattcttatgactgtagatttttcatcagagaccatggaagccagaagacaatggaataacacctttaaagtgctgaaagaaaagaactgtcaacttgaaattttctatctagtgaatattccctttgagaataaaagtgaaataaaaacattctcagataaagaaagcctaaaagaatttgtctccagaacacctgttctgaaagaaatgctaatagaagccaaagtgaaataataccaaaaggaaacttggaactacagaaatgaaggaagagcaacagaattggtatatatctggataaagttaggttatttttctctccttacataaagttatttatgatcattgaaagaaaaaattataacacagtctaggagagtttcaatgtatgtagatgtcatggataggacaattataaacaacagggggaaggtaaagggacccatatacaggcatacctcattttattcattttcccatcgtgttttgtagatattgtgattttacagattgaaggtttatggggcaagtctatcagtgccatttttccaacagtatatgttcacttcctgtctcttgtatcacattctggtaattcttgcagtatttcaaacttgttttttcttttgtagagacaaggtctcactatgttgaccaggctggtcttgaactcctggcctcaagtgatcctctgcccttggcctcccaaagtgctaggattacagatgtgagccatcgaacttagcccaaactttttcattattattatatctgatgtggtgatctgtgatcagtgatcttggatgttactattgtaattgttttggggtgtcacaaatcacacctatataagatggcaaacctatagttgataaatgtagtatgtgtctggctgctccactgaccacctgttccctcacctttctccctcttcttggccctccctattctgtgaggcaatatacattgaaattaggccaatgaataaccctacaatggcctctaaatgttcaagtgaaaagaagagtcacgtctgtgtgcggtggctcatgcctgtaatcccagcactttgggaggccgaggtgggcggatcacaaggtcaggagttcgagactagcctggccaacatggtgaaaccccatctctactaaaaatacaaaaattagcctggcatggtggcagatgcctgtaatcccagctactcaggaggctgaggcaggagaattgcttgaacccaggaggcaggggtcacagtgagccgagatcgcgccactgcactccagcctgggggacagagcaagactccgtctcaaaaaaaaaaaaaaagaaaagaagagtcacatacatctctcactttaaatcaaaatcatgatatgattaagcttagtgaggaatgtacatcaaaagactagataggtcaaaagctaggcctcttacaccaaatggttagccgagttgtaaatgcaaagtaaaagttctcaaagaaaattaaggccaggcgcggtggctcacacctgtaatcccagcactttgggaggccaaggcaggtggatcacgaggtcaggagattgaggccatcctggctaacgtggtgaaaccccatctctactaaaaaaaaaaaaatacaaaaaattagctgggcatagtagcgggtgcctgtagttccagctactcgggaggctgaggcaggagaatggcgtgaaccagggaggtggagcttgcagtgagctgagattgtgccactgcactccagcctgggtgacagagtgagactctgtctcaaaaaaaaaaattaaaagtgctactccggtgaacacatgaatgataaagtgaaacagtcttaatgcttatacagagaaagttgtagaggtctggatagaagattaaacaagccacaacattcccttaagccaaaacttaatctagatcaaatccctaactctctttaattttatgaaggctgagagaggtgaggaagttgcagaagaaaagtttgaaggtagcataagttggctcctgaggtttagggaaagaagccatctccagaacataaaagtacaaggtgaagcagcaagtgctgatgcggaagctgcatcaagttctacagaagatcgagctaagatcactgatgaaggtggctacactaaacaacacattttccatgtaggcaaaacagtcttctattggaagaagatgccatcaaggactttttttttttttttgagatggagtctcactctgtcacccaggctggtgtgcagtggtgcaatctcagctcactgcaacctccatatgctgggttcaaacaattttcctgcctcagcctcccaagtagttgggactacaggtgtacaccaccatgcctgcctaattttttgtatttttagtagagatggagtttcaccatgctgaccaggctggtctcgaactcctgacctcatgatctgcccgcctcatcctcccaaagtgctgggattacaggcatgagccaccatgcccagccagccacctaggacttttatagctaaagataactcattgcctggattcaaagcttcaaagcacaggctaactctcttactaggggataatgcagctggtgattttaagttgaagccaatgtccatgtaccattatgaaaatcctagggccattaagaatgatgtgaattctctgcctatgctccataaatggaacaacaaagcctggatgacagcatatctgttcatagcatggtttactggatattttaagcctactgttgagacctactgctcaggaaaaaagattcctctcaaaatattactactcattggcaatgcacgtggtcacccaagagccctgatggagatgtacaaggagattcaggttgttttcatgcttgctaacacatcattcattctgcagtccatggatcaaggagtaacttcgattttcaagtcttatttaagaaatacaggccaggtgcagtggctcacgcctgtaatcccagcactttgagaggccgaggtgggcggatcacagggtcgggagttcaagagcagcctggccagcatagtgaaaccctgtctctaataaaaatgcagaaattggccgggcatggtggtgggcgcctgtagtcccagctacttgggaggctgagcaggagaatcgcttgaacctgcgagtcagaggttgcagtgagccaagatcatgccactgcactccagcctgggcaacatagtgagactgtgtctcaaaaaaaaaaaaaaaacatttcataggctagagctgccatagatagtgatttctctggatgatctgggcaaagtaaacaaaaagccttctggaaatgattcaccattctaaatgtcattaagaacagttgtgattcatgggaggaggttaaaaatatcaacattaacagaaatttggaagaagttgattccaaccctcatgaatgactttgagaggttcaagtcttcagtggaggaaggaactgctgatgtagtggaaatagcaagataactagaattaaaagtgaagcctgcaaatgtggctgaattctgtaatctcatgataagactttaattaatgaggagttgcttcttctggataaacaaagaaagtggtttgtcaagatagaatctactcctgttgaagatactgtaaacactgttgaaatgacaacaaaggatttagaatattacataaacttagttgataaagaagcagccagaattgagaggattgactccaattttgaaagaagttctactgtgggtaaaatgctatcaaacaccatcacatgctacagagaaatattttgtggaaggaagagtcaattgatatgcaaactttattgttgtcttattttaagaaattgccacagccactccaatcttcagcaaccaccacccttattagtcagtaatcatgaacactgaggcaagaacctccaccagagaaaagactatgactcaccgaaggctctgatgattgttcagatttttaagcaacaaagtactttttaactaaggtatttacattttagacaaaatgtcattgcataacactgtatgcaatgtctaatgtaattagacataatgttattgcacatttattagactataatatagtataaacacaacttttatttattattgtttttctttttagacgaactctttgctctgtcgcccaagctggagtgcagtagcaatcttggctcactgcaatatgcacctcctgggttccagcgattctcctgcctaagccactttggtagcagggattacaggcatgttgccaccatgcccggctaatttttgtatttttagtagagacggggtttcaccatgttggccaagttggtctcgaactcccaacctcaggtgatccacctgcctcggcctcacaaattgctaagattacaggtgtgagccactgcacccggccttaaacataacttatatatgcactgggaaaccaaaaaccttgtgtgattcactttgttgcaatattcactttactgaagtggtctagaactgaacctgcaatatttccaaggtatgcctgtagttgtgagatgtcagtgttttacttgaagtgttaaaacattgattttaagttgactgttaaaattaggtatgtgtattattatccctagatcaacagctaaaaaaaaaaaaccacaaaagatatagacaaccaatatattaaattggaatataaaacatattcaaataatccaaaatataacaggaaaggggacattgagaggcaaaaaaatggaggagacaagcagaaaaataacaaattgtagaccaaaatccactcttatcaataactacattaaatgtaaatggtctttaaaaatgtaaatggtctaaacacaccaattaaaagacaaagatggctgggtgcggtggctcacgcctgcaatcccagcactttgggaggccgaggtgggctgatcacctgaggtcaggagttcaagaccagcctggccaacatggtgaaaccccacctctactaaaaatacaaaaattagccgggcaaggtggtgcatgcctgtaatcccagctactcgggaggctgaggcatgagaatcgcttgaacctgggaggcggaggttgcagtgcactgagatcatgccattgcattccagcctgggcggcagagcaagattccatttcaaaaaaaaaagacaaagatcatcagattggaaaaagaaaaaaacaagacccaactatatgctattacattttattttatttttacttctcaaatgttaaggaaacctattttaaatataaagatataaatatagggaaattacataatgataaaagggtcaattcaccaagaagataaacactgaaatataatatgcaactaacaaagatccaaaataaatgaagcaaaaattgatagaactaaaagagatatggaaaaatccacagtcataactgggagactcaataagtccattctcaatgactgataaacaaatagatggaaatcaaaaaggatatatcaaacctggataacgttatcaactggtttaatataatggacatttacaaaaaacactctacccaagaacaacagaatacatattctttccaagtgcccacagaacatatacccagatagatcatattctgggtcataaaataaactaacaatttttaataaaaccacataaagcatgttctctggctataccaaaattaaacaagaaataaataatagaaaactcccccagcctaaccaacatggtgaaaccccgtctctactaacaatacaaaaattagctgggcatcgtggcgggtgcctataatcccagctactcgggaggctgaggcaggagaattgcttgaacctgggaggtggaggctgcagtgagctgagatcacgtcattgcattccagtccaggtggtagagcaagattccatttccaaaaaaaaaaaaaagacaaagattatcggattggaaaaagaaaaaaacaagacccgactatatgctatcagcaagaaagctattttattttatttttacttctcaaatgtcttatggtttaaggaaatctattttaaatataaagatataaatatagggaagttacataatgataaaagggtcaattcaccaagaagataaacactgaaatatagtatgcaactaacaaagatccaaaataaatgaagcaaaaattgatagaactaaaagagacatggaaaaatccacagtcataactgggagacttcaataactctgttctcaataactgataaacaaatagatggaaatcaaaaaggatatataaaacctggataacattatcaactggtttaatataacggacatttataaaacactctactcaagagcaacagaatacatattctttccaagtgcccacagaacatatacccagatagatcatattctgggtcataaagtaaactttaacaatttttaataaattaaaaccacacaaggccgggcgtggtggctcacacttgtaatcccagcactttaggaggctgaggcagtggatcacctcaggtcgggagttcaagaccagcctgaccaacatggtgaaaccccatctccactaaaaatacaaaactagccgtgcatggtggcacatgcctgtaatcccagctactcgggaggctgaggcaggagaaccgcttgaacccaggaggcagaggttgtggtgagccgagatcatccacataaatggtgttctctggctataccaaaattaaataagaaatcaataatagaaaactcccccagcctgaccaacatggcaaaaccctgtctctactaaaaatacaaaatgtcattgcataacattgtatgcaatgtctaatgttattagacataatgttattgcacatttattagactataatatagtataaacataacttttatttattattgtttttctttttagacgaactcttgggcgtgatagtgcgcgcctgtaatctcagctattcaggaggctgaggcaggagaattgcttgaatccaggaggtggaggttgcagtgagctgagatcgcaccactgcactccagcctgggtaacagaacaagactctgtctcaaaaaaaaagaaaaaaaagaaaaaaaagagaactctcaaatatttagaaattgttaatatacttctaaataatccatgggtcagagaaaaaatcttaaagtaaatcagaaaatatttgaactgactgaacatcaaaacaaaacatatcaaaatttatgggttgcagctaatgcagcgtgtacaggaacatttatagctttacatgcctatgatagaaaaaagaaaggcctcaaatcatactctaagcttctaccttaagaaactagagaaagaacaaattaaacctaaatcaagcagaagaaaaagaaattagaaaagcagaattcaatgaaattgaaaacagaaaaaaatagagaacaatcaataaaaccaaaagctttgaaaaggtgtacagaattcataaactttttgacagatttaccaaggaaaagaaagagagaagacataaattactaatatcaggaatgaaagaggggatgtcacttcagaccctccagatattaaaaggataataagagaatattacaaacaactctatgctcataagtttgacaacttagaggaaatggaccaatttcttgaaagacacaaattacctaaactcagtccagaagaaacagatcagagaaatagtcctaaatgtactaaagaaaatttaattcatagtttaaaaccttccaatgtagagaagaaaactccaggcccagaaggtttcttttcttttccttccttcctccctccctccctccttccctccctccctccctccttccttccttccttctctcttttctttccttttctcttttcttttctttccttttctttcttttctttgtggcagggactcactcctgttattcaggctggagtacagtggtgcaatcacagctcactgcagccaagacttccacacccagcaaatttttttgtatttttagtagagatgggttttcatcatgttgcccaggctggtctcgaactcctggctcaagcaatctgcctgccttagcttcccaaagtgctgggattacaggcatgcgccaccatgcctggcccccaaatggtttcactgggaaattctaccaaatgttaaagaaagaaatagtatcaattccacacaaactcttccagaaaatcaaaaaaacttagctcattttatgaaggcagcatggtcctgatgccaaaatttgaaaaagataacaagaaaactatagaacaatacttcacatgaacatataccccaaaacttcaacaaactacaaactattagcaaaggaatccagaaatatatatatatttttaaaaaataatacttcactactatgtggagtttatcccaggtaatttaatgctggtgtaacattcaaaaatagccaggcatggtggctcacgcctgtaatcccagcactttgggagggtgaagcgggcagatcacctgaggtcaagagtttgagaccagcctggccaacgtggtgaaaccccgtctctactaaaaatacaaaaattagctgggtatggtggtgtgcactagtagtcccagctacttgggaggctgaggcaggagaattgcttgaacccgggaggtggaagttgcagtgagctgagatcgcaccactgtactccagcttgggggacagagcaagactccatctcaataataataataataataaataaatgagcataattcaccatattggcagactaaggaagaaaaaaacacatgataatcctaactgatgaagaaaatgcattaacaaaatttaaaacccattcatgataaaaaaaaaaaaatctctcagcaaactagagaaggaaacttcgttaatccaaaaatatatatatatattggccgggcgcagtggctcacacctataatcccagcactttgggaggccgaggcaggcggatcacctgaggtccagagttcaagaccagccttaccaacgtggagaaacctcgtctccactaaaaatacaaaattagccgggtgtggtggtgcatgcttgtaatcccagctactcgggaggctgaggcaggagaattgcttgaacctgggaggtggaggttgcagtgagccaagatcatgccattgcactccagcctgggcaacaaggacaaaactctgtctaaatatatatatatatatatatatatatatatatatatgtatatatacacacatatatatgtacatatatacatatatctacatatacatatatacatgtatacatatacatatgtatacatgtatatatgtatatatgtgtatgacctccggtgatcccccccccaacctcggcctcccaaagtgctgggattacaggtgtgagccactgcacttgaccgcaaatcacatttctaacaaaggacttgaatccagaatttattttttaacatttttaaaaaattttattttattttatttttggtagagacaggatttttgtatgttgcccaggctggtctcaaacttctgacctcaagtgatcctcctgctcagcctcccaaagcactaggactacaggcatgagccactgtgcctggcctagaatttataaagaaccctcagtagggcgcagtgcctcatgcctgtaatcccagcactttgggaggctgaggcaggcggatcacgaggtcaggagttcaagaccagcctggccaacatagtgaaacctcgtctctactaaaaatacaaaaaaattagccaggcatggtggcaggcacctgtaatcccagctactcaggagaatgaggcaggacaatcacttgaacccgggaggcagaggttgcagtaagccaagatggcgtcactgcagtccagcctgggcaacagtgtgagactctatctcaaaaaaaaaaaaaaaaaaaaaaactctcaaaactcagaaataagaaaacaaacaattttttaaaaaggcaaaagttttgaacaggcacctcaccagagaagatacatggatggcaaataaatatttgaaaatatgctcaacatcatttgttggtagggaattgcaaattaaaaccacagtaaggtatgtctatacacctattgaaattgaaaaaaatccctgacaataccaattgttggtgagaaggcggaacaactgccactctcataaattactggtgggaaaacaaaatgatacagcccctctaggtttcttataaagttaaacacacacttaccataggctccaacaatccctcctagaaattagcccaagtaaaatgaaaatttatgttcataccaaaacctgtacgtgaatgtttacagaagctttattcataattgccaaaactagaaacaacctaaatattcctcaactgggaagtggagtaacaaactgtggtacatccatacaatacactactactcagcaatgaaaaggaattgactactgatacactcaacaacatggatgaatcttaaatccattatgccaagtgaaagaagccaaattcaaaatacaacatattgtatggttccattttatatgacagtctggaaaagaaaaaactataggaatagagaacatatcagtgttgccagggcttaagggtagggaaggctttgactacaaaggggtaacaaaagggaatttgggaaggtgattaactgttttatttttttgtttgtgtgtggtggtgtttacataattctttgcatttgtcaaaactcacagaactctacaccaaaatgtaaattttactgaatgtaaattacaattaaattatatgtatgcaaatctattatgtgtatgtttgtgtatatatatatatatatatatacacatatgaatatttttaaaagctttttcccctcatattactatcaagtcatatctcacagattttgtatttgtacaattattctttcttgagcctgaaattagttaggactgttttgttttgtttttttcttgagatggagtcttactctgttgcccaggctggagtacagtggtatgatctcggctcactgcaacctctgcctcccaagttcaagtgattctctggcctcagcctcccgagtagctgagactacaggcgctcaccaccacacctggctaattttcatatttttagtagagacggggtttctccatgttggtcaggctggtctcgaactcctgacctcaggtgatctgcctgccttggcctcccaaagtgctgggattacaggtgtgagccaccacgcccggtcaagttaggactgtcttcatctctgttaaccttccatttcctctccttccacaaaacctaaactttattattatttgaaacataatttttgagtaagttattccgtctcaagaaggtccaattcgtgttattgagaatggtaaaataatacactacctgccctgggcactttagtgagaatccatttattgggttaactagcagtgactgtggatggcagtgagcaggcctgggagtggccaggacataggacagatgtgctttgatgggagagaagggaaggaaaagccggcagcacagcgatgggaaactagaggccagaggtagaggtggagggcaatgatcagggagcagagatgacagcatgccaaggacatcctgtgctgacttcacaggctggctctgggcataggccagtctcttcctggagctttcattttctctcttcggaatctgtcaactctctactgcaatctgttccacagtcgtatagccaaaatcctcttgctctgtgtctgtttattcaacaaatatttatcttaactgactctaatcacattgtctcctgtttgtcctgcagtgaagcccttttacatctgcttatctcttttgatccaagggaaggagacttaaccctgacttccagagaaggaaatagtctcagaaaggttaagtcatttatctgaagttgcccttttaatactgagtactggactctctcagtatccgcgtactctgctgccccctaccgtgaacatagcaataggttttaaatcacaaaaacacacagcagaacactacacaacactggaaagactacgacactataaatagtgcttacatttgttcatttagcaaatattcagctggacgtggtggctcacgcctgtaatcccagcactttgggaggccgaggcaggtggatcacttgaggccaggagttcaagaccagcctggccaacatggtgaaaccccacctctaaaaatactaaaattagccgggcatggtggcacgcacctgtaataccagctactcgggaggctgaggcaggagaattgcttgaatccaggaggcggaggctgtagtgagccgagatcacaccactgcactccagcctgggtgatacagcaagactccatccccaaaaaataaataaacaaatattaattgagagcctactatatgccagaaataagcaggtattgtccttgtgttcatggagcttatggtgtagagggggagacagaattacacaaaataattacttaattacagtttgaataaatactatgaagtacaaggtgctatatgagggtatagaataagggtatgtagcctggtctggaggcttagggaaatcttacatgaagtagaattcataggaataaattattggttggctatgggggaggttaaagagacatcaagaatgccttccaggtctctggcatgaacaactgggcagatagagcactgttactaagcaggggaagcctagaggaggaagacattatgaatggaaagaatatgaacttggctttggctttttgcagttcgggaatcccacgagacattaaggtatagatgtggaataagcaatcagattcaggagtttgggagcaaggtctatgctagaaatagaaagttgggagttgttgggatacagattatatttgaaactgtggtcatggatgacatttcttagaaaataatagaaagagtagaaggcttataacttccctgagaaactccagaatttaaaaggtcaactggaagagatggagctagcaaaaacttaggacaaggggccaaggaggggaaaatcaggaatgtgcaatgatgccaaagtcaggggaagtgtatttcaaaaagaagactggtcaaccatggtggtaattacaaagaaatcaagtgcaatgactttcttggtctacgatgatttttttggtctgcctagtgaaacagattcagtttcagaggactagaggtggagaagactaggccactacctcttagaaaacctcctaaaggccaccatagcctatggtcttgaaccagtggtcttcatagtcttttgctcacataccacttaaaataattttgataaataatgtgagctgggcacagcggctcaagcctgtaatccaaatgttttgggaggctgagtctggaggatcactggaccccaggagtttgagaccaacctgggcaacatagagaaactccatctctacaaaaattaaaaaattagccaggtgtggtggtgtgtgtctgtagtcctagctatttgggaggctgaggtgggagaattgcttgagcccaggagttcaaggctgcagtgagctataatcatgccactatacttctacctgggcaacagagcaagaccctatctctaagaaaataaataaataaaatttttaaaaaacattaggccaagtgcagtgactcatacctgtaatatcaacactttgggaggccaagatgggagaactgtttgagcttaggaattgaggaccagcctgggcaatatagtatgacctcatctctatgaaaaatttttaaaaattaggtgggtgtggtggcacacgcctgtagtctcagctacttgggaggctgaggcgggaggatcacttgaactcaggagattgaggctgcagtaagctacggttgcgccactgcactccagcctgggcaacagagcgagaccctgtctcaaaacaaacaaacaaaaatatagacatatttttaaaagataatagaaggctattttctgaatcttgtatttttaactgtccccagttctgaacttttttttaattgccccgtgcaatgtatcattcagggtgggtcagatatatgcctttctttcttttcttttttccatttttttttttttctctgagatggagtctcactcttgcccaggctagagagcaatggtgtgatctcggctcactgcaacctccacctccagggttcaagcgattctcctgcctcagcctccccagtagctgcgattactggcacgtgccactgtgcctgactaatttttgtatttttagtagagacagggtttcaccatgttggccaggctggtcttgaagtcctgacctcaggtgatccactcacctctgcctcccaaagtgctgggattacaggcgtgagccaccatgcctggcctttcttatgaagactagcagaactacaattatgaagaaaaagtcggcttggagcctcaaccccaggaactttctcaggtggagtacatctggaagttgaggatctggaaatgaatttccttaaatatatccatgcatgagtaccgcttaccaagccttcatttactttacggctattgcataccccatttgaaaaccagtgttgcaaaggactgggggcaatctgaaactactgggttcctggaacctggcactgattgatggggccagtgggccctaatgagattgcacctccattttaaaagcgtgaaaggtataaggagattcagagataggtgtaaatggcttgcgggagcctccaaaattttcaggtccaggtacctcccaccccttcaagggactgtctgatactattctatggctcctggaatgaagaaccagtcatcaggacctgctggcctctattaaattaagagtccagtcagatttaacaacctgaagatgaggtgtaactgtgaagcaatatatggctgattttttaacacacccatccaaatacatccactccagctgattcattctctcaactcccatgtgctaggtaatgtatgaggtgccagagttacccaaaaaacaaacaaagcacaatccataggccaagtcctgcagaaactctaggagagaaacttttaaagaaataattataaaaacactgtgatcggctgggcgtggtggctcacgcctgtaatatcagcactttggaaggctgaggcaggaggatcacccgagatcaggagtttgagaccagcctggccaacatggtgaaacaccatctctactaaaaatataaaaaaattagctgggtgtggtggctcacaactgtaatcccagctacttgggagactgagagcaggagaattgcttgaacctaggaggcagaggttgtagtgagccaagatcatgccactgcactccagcctgggttacaagagtgaaactctgtctcaagaaaaaaaaaaacaaacactgtgataaagagttaataaaactatgtgcaagagctaggggagtactgaagaaagagtgatttgagtaagaactttgtaagactttgagtaagaactttttaagactttgggaaaacttcccaaaggaggtcacattagagttatttattggcaggcgtgtagtacatcatagagaaaaagagatggcagtggaaggatgttccaggcagaggatgcagcatgtcacatgggcagccagtgtccaagtgacactcaaggggcaagacctgcttcatggacttgtgacctctgtagtcacacagggcccccctcttagaagggccctcacgcttgttttaatgttctgctgtcatcattttgaaattcttattttttttttaacaaggagacttgcattttcatttttgcactgggccctgcaaattacgtagcaggtcctgcaagagggcaagatgaaggcagggagacctgctgggaagttattactgcggtccaagtaagagataatgaaggggctaaatcaaggtcttgtcgtaacagtaatacacagccacaccattttcaacttcttcccagtgtattcctcagtttagatgtagcaatttccccaactggaaagtacttaggttgattttggtgttttgtaattacaaagaatgaggcaattgaataatttgctacaaataattttgtgtttgcacctatgcaaggatatctatctaggataaattctcagaattagaattgatgggtcaaaggtatgctcattttcaaggttgataggcattgccagttggtgacctgaagagagtaaaccaatttgtatctcttccaacagtatggaggagtatctgttttatcatgccctctttaacactctgtagtatccaaccttttggtatttgcagtctgataatgttaagaaagcagtggctgattgtcttaatttgcctttctttaattacaaacatggttggtcatttaaaaaattattataggagtctgttcaggccaggcacagtggctcacgcccataatcccagcactttgggaggccgaggcagatggatcacttgaggccaagagttccagatcagcctggccaacacggcaaaaccgcgtctctacaaaaaacacaaaaaaattagtcaggtatggtggcatgtgcctgtagtcccagctacttgggaggctgagacatgagaatcgcttgaaccaaggaagcagaggttgcagtgagttaagatcgtgccactgcactccatcctgggtaacggagcgagactgtctcaaaaaaaaaaaagagtccatttatatttctgtttgcatgaagcccatttagtccttcgccattattgaattgggtcataggtctttttcttattggtttataacagctgttttacgttaaaaaaataataataaatattttacctagtttatagtttgttgctttatttctgctttttttttggccatgcagatgaaggcctgaatttttgaaacctaagtgaactgttactgctttcactgtataccagtattttgcaatataagccctcttttcagggagtggcctttagagactattacacttatttttttagaagctcagcttgttcatttggagaacatacaatattaaagggaaaaaatgctcagcttgtacttattttttgaagagataatatatccacatgattaaaaagtcaaaagatacaaaaaggtatacagtgagaaaaatctccttccagccaggcatggtggctcccacctgtaatcccagcacttttgggaggccaaggcaggcggatcacatgaggccaggagttcgagaccagcctgcccaacatggtgaaacactgtctctactaaaaatataaaaaatagctgggctttgtggtgtttgcctgtagttctagctacttcggaggctgaggcaagagaattgctccaacccaggaggcagaggtttcggtgagccgagactgtgccactgcactccagcctgggtaacagagcgtgactccatctcaaaaaaataaaataaaataattaaaaaaaattaaaaaataaaaataaaaattgccttcccaccctgtcctcaaaccacttaagcttccctccaggaagtaagcactattatcagttccttgggtatctgtccctattttatgtgtaaatgagcaagtgcatgcacacacatgtattcttttttccgattattacacaaatagtagcctacaatatccaggattctgcacctttgccttttttttaccacttaacattacattttggaaataatgtcctaattattcataaattcgtaagtacttcctcattttaaaaaatggctgcattgggccgggcgcggtggctcacgcctgtaatcccagcactttgggagtccaaggcgggtggatcacaaggtcaggagatcgagaccatcctggctatcacggtgaaaccctgcctctactaaaaaaatacaaaaaaattagctaggcgtggtggtgggcgcctgtaatcccagctactcgggaggctgaggcaggagaattgcttgaacccaggaggtggaggttgcagtgagccgagatcgcgccactgcactccagcctgggcgacagagcgaaactccatctcaaaaaaaaaaaaaaaaaattacaaaaggctgcatagtgtcccattgtatgcattggtttgaatatgcttttaagggagaaacctgagtaagaaatactctcaagtcatttggggctggacattgagactgagtcgggggattggactgggaccttctctagatcctgaacaatcagaccttttccttcctccaggcctttacctcccattttctttttctttttttttttttttttgagatggagtctcactctgtagcccaggctgaagtgcagtggcaccatctcagctcactgcaacctctgtctcctgggttcaagagattctcctgcctcggcctcctgagtagctgggattacaggcacgcgccaccaagccaggctaatttttttgtgtttttagtagaaacggggtttcacccatgttggtcaggctggtctcaaactcctgacctcaagtgatccacccgcctcagcctcccaaaggtgctgggattacgggcgtgagccacagcgcccggccttttaccctccattttctgccaattaaaacttcacacagtcttccattgcttgtaacttttgaacacgtgtgtggtaatgttctgtgtatattgcatataaaactattagcttttaaaatattaccagtttatatagactcatctcaaatgctacttccttttggaaaccttccttgatctccctgatatccccagccagagtgacctcactcccctctgaaatcctatagaatggtgtaatgttttgtggttatttgtcacgccttttatgtgcacaagtcttatcttttttttttttttaacctgaagacggcctcacttgccccagtaccttccacagagtggcttctgagtaatgtttacagaatttttgaggtaattaatgaatgaacaaaggcaccaagggttaaggacatgaatttagtgtcagacacttgggttctactcctggttttgctgttttttaggtgtgtcgtggggtaggtcacttctctcaccctttccttagaatccacttcacaggacagtggtgaggattaagtgatttgatgtaggtaaattgcttttcattgactgttagctgctgaaataggaattcagaggaaggaggagagaggtcaaggagacttcctaagctggactgtgctctccagccaccctctcatttatatttcctttcagatctctactaagaatgtcactctggccgggcgcagtggctcactcctgtaatcccagcactttgggaggccgaggcaggaggatcacttgaggttgggagttcgagaccagcatgaccaacatggaaaaaccccgtctctactaaaaatacaaaattagccaggcgtggtggtgcatgtctgtaatcccagctactcgggaggctgaggcaggagaatcacttgaacccgggaggcaggggttgcggtgagccgagatcacaccattgcactccagcctgggctacaagagcgaaactctgtctcaaataaataaataaataaaacaaaataaaaaataaagaatgtcactcttccttgttcctgcattttctttttatgtctttatcttttgggtaaatttgcctggcttcagggcgaaggccctccagcaccaagagctgcctagtactgcagattcttacgaccactcaaatctttctttcctttataagaaacaagcaactctaccctatggttgagccaatgtgtcagtttcttcctatccaaatggatggcatcctgacatctgcagtgagaggccaatgcaatttggtgggggtaggggcaagggtgggggagttttgcagagcataaagagcacagtatcttggatcttcagcagcttgagttcagttcttaacttttcttgcctcattacaacagtgtcacaacccattttcctcatacattgagaactgctgcagtcaggcacggtgactgttacatggctgttatattggccatggatggccaacatagtgagacctccattttaaaaaaaaaattaaaattagtcaggcatgatgacacgtacccgtagtcatagctactcaggagactgaggtgggaggatcgctcgagcccaggagtttgaggttgcagtgagctatgatcatgccagtgcactccagcctgggtgacagagtgagatcctgtctctaaaaaaataaaaataattagaaagaatatgattggaaaaaaataaaaatacaagtaaaaataaaaaagaactcttgtgaggaaagcatctaacaatgctagacaaaaagtaagtaaccaacaaatgcaagttctccctttaagctcttctccacactggtaccagatttgtactgctaaaagtcctgttctttcctcttattatggaggaattatcctagctcatagccaacctcctcactcatatacatgcttactcaagggcatggcttcagcagttctcctctctctcctgcatcatcaatttttccctctctcctggatcagtctcaatcaacatacaaatgttatgtttcccatcttaaaaacaaacaaaaagtctgttttgactccactaccaactacagctgccacattttctccttcttctttgtagtaaaacttcttgaaaaagctataacctgtatactcaacattttcaattcctcttgaacctactccaatcagatttttgtcccatacactccaccaaaacatctcaagatcaccaacaacctccacattggtaaatctaattaccttctattcatcttcatattatttgatctgtgtgacacagttgattactctctctttcttaaaacattttattcacttggcttccgggagttctcactttcctggttttcttctttttggctcttccttctcagtgtctttggctgattcctcttcattttcccaacctctaagtattagagttgccccaggatccagtcattggaactctttgcttttctgtctacactcatttcctaagtaatttcttcagtcccttgggttttacatattatattgattctgaaaacctccaaattcccacttcactctcaaccttcttcctgaactcaggtccaaatatcaaaatagcctacttaccacatccacttgggtgagctcttcatatttctactcaaacctgtccctcctgcagtcttctttgtgtcaaataatggcaactccattcttctagttgctcaggtcaaaaagtttggtaattggtgaacacgccgtccacgtgcgccttgctgtctctccattatcgcttgagatctccagccttaccgcggcttgaaatggaccccaactgctcctgcaccactggtggctcctgcacgtgcgccggctcctgcaagtgcaaagagtgcaaatgcacctcctgcaagaagagctgctgctcctgctgccccatgggctgtgccaagtgtgcccagggctgtgtctgcaaaggggcgtgcagctgctgtgtctgatgtggggacagctcttctcccagatgttaatagaacaacctgcacaacctggttttttttccttaatacaaccctgagccatttgctgcatttcttttcatattaaatatgtgaatgacaataaaacaattttgacttgaaaaaaaagtttggtaattggtaatgtgactctccgctttgtctcatacctcctatccaatccattaacaaattctgccaactctactttcaaaatctatgattccaaaaaaatccaaaaaaagtgtaaagggaaaaaatacaaaatacaaaaaacaaaaaattaaaaatcaaagtctatgagaatccaactacatctctgtatctctacttggacccaggtctgagccgccatcatcttgtacttggattattgtaatagcctcctaactggcctttctgatatggtcttaaaaccttttctcagcccagcaaccaaagtaattctgttaaaacataagccagaagatgtctcttccactctcagaacctctcatcagtttttgttaagagacagggtctcactcttgctcaggctggagtgcaatgcaatgatgatcacatagtttacgacattctcaaagtcccatgctcaagcaatcctctcacctcagcctcccaagtagccaggactacaggtgtaccccaccattcctgggtaatttttttttgtttttggtagagatggtgtcttgaactcctggcctcaagtgatgagtgagagtatcaggagatgacagatgatgatcaggtgagaggatcaagagactgtcctacctcagtctcccaaagtgctgggattacaggcatgagccaccatgcccagccccatcagttttttatctcatgtagaccacccttccctccataaccttcatctcctgatactctcactctcttccactctaaccacagtgattcttacccttttcctcaaacctaccaggcacgttcttgcctcaaaacttttgcatttgctgttccgtctgcctggattcatttctttcagatatctacatggttcactcccttgttcctccagatctttacaaaaaactcacttttttactgaggccttccctggccactccatccaaaaattttttttttttctctctctctctctctctcacacacacacacacaccattcagatttcaagtcctaaatcctgcttttctcaacagaaaaaaaatgctatttaactacatatatatatttaaatcattttgttcgttgtctatcaccccagtttttttgtttgtttgtttttgttttgttttgttttgttttttcttttgagacagagtctcactctgtcacccaggctggaatgtagtggtgcgatctcagctcactgcaacctccacttcccgggttcaagtgattctcgtgcctcagcctcctgagtacctgggatgacagatgtgcaccaccatgcccagctaatttttgtgttttttagtagagatggggtttcaccatgttagccaggctggtcttgaactcccaacttcaggtgatctgcccaccttggcctcccaaagtgctgggattacaggtgtgagccaccatgcccggcctgctccattataatttaagttccatgaaagcaggaagtgttattagatttgttcaaagctctatcatcccagtaccgagaataatgttcaacacaaaataggtgtttcacataagtatttgttgaacttgtttcttgagtgaaatcaaacgttatcattttgctcctctgttttgggtcattctgcccagaacagagtactcatgccttttggtctcaggaccctctctacactcaaagtattgagggccagacacagtggttcattcctgtagtctctggtacttgaaaggctcaggtgggaggatcacctgagctcaggagtttgaggttgcagtgagctatgattgtgccactgcactgtagcctgggcgacagggtgagaccctgtctcaaaaaaaaaaaaaacacaaaaacattcaggctgggcttggtagctcatgcctgtaatctcagcactctgggaggccgaggcaggcagatcatgaggtcaggagttcaagaccagcctggccaacatagtgaaaccccatctctactaaaaatacaaaaaattagccaagtgtggtggctggcacctattacgtaatcccggctacttgggaggctgaggcaggagaatcgcttgaacctgggaggcagaggttgcagtgagccaagatttcgccactgcactccagcacgggaaatagtgcgagactctgtctcaaaaaaaaaaaaaaaaaaatttcaggactccaaataacttttgaaaattcaggactccaaataacttttgtttatgtggattctgtctattgataagtatcacactagggatcaaaactgagaaattgttaaatatttacatactaattcatttaaaataacaataataaacatgttaacataacatttttatttttaaaaaaataataaaaatttagctgttttgttccaaaacgaaacaaaaaaaatagtgagaggaatgctactgttttgcttttttgaaaatctgttttatgtctggtttaatagaagataattgtattatcctatttacttctcattcaatctgtataatgtgccatgaagccctggaaaactacccagtactctcatgagaaaatgagagtttaaaaagaaaacaatgtcttcgtattattatgtaaatggttgttgtctccatatatatctgttgtctttgtacatagttttccctcccattctacatagcaaactcctgctggtcactcaaggtctgtctcacctgccatctctagacagtcagttgttccctcctccctactcccatttctctattatagcacatattatgttatcttgttatctggataattgtctatcttcccaaccgactatcttcctaaagaaggcaactataacttgatcttctttacatccctagccccactcacagtatctagcaccaaaaagatatttaataaatattagttgaataaagaaatatgaggccaggtgcagtggctcatgcctgtagttctagcactttgggaggccaaggcaggtggatcacctgacgtcaggagtttgagaccagcctggccaacatggcgaaaccccatctctactaaaaatacaaaaattagccgggcatgttggtgggtgcctataattccagctgctcaggaggctgaggcaggagaaccgcttgaacccaggagacggaggttgcagtgagccgagatcatgccacttcactccagcctgggcaaaagagcaaaactccatctcaaaatatataaataaatatgaaaggaggtgaagggaagaggggacccagtttatctacagtgagctcaggcactgatataacatttcttttttttcttttcttgagacagggtctagctctgttgcccggactggagtgcagtggcataatcacagctaactgtaatctctgcctcctggcctcaagtgatcctctctcctcagcctcccaagtagctgggactacagccatgtgccacaactcccagctaaatttttttttttttttttttttttgtaaagacagagtttcaccatgttgcccaggctggtcttgaactcccgggctcaagtgatccatcctccttggcctcccaaagtggtaggattacaggtgtgaacaactgtgcccagccaatatcataattcttttcttttctttttttttttttcttttttgaaacagagtctcttgtcgcccatgccagggtgcagtggcacaatcttggttcactgcaacatctgcctcccaggttcaagcaattctcctgcctcagcccccaagtagctgggattacaggcgtgcaccaccacgcccggctaagttttgtagagatggggtttcaccatgttggccaggctggtctcgaactccagacctcaggtgatccacctgcctcagcctctcaaagtgctgggattacaggtttgagccactgcgccagccccaatataatatttcttgttaagattatcagtgtcaaaggttttccaacatcacactctggggactgttgtggggtggggggaggggtgagggatagcattaggagatatacctaatgctaaatgacgagttaatgggtacagcacaccagcatggcacatgtatacatatgtaactaacctgcacattgtgcacatgtaccctaaaacttaaagtataataataataataaaaaaagaaagaaaaaaacaaacaaccccattaaaaagtgggcgaaggatatgaacagacacttctcaaaagaagacatttatgcagccaaaaaacacatgaaaaaatgctcatcatcattggccatcagagaaatgcaaatcaaaaccacaatgagataccatctcacaccagttagaatggcaatcattaaaaagtcaggaaacaacaggtgctggagaggatgtggagaaataggaacacctttacactgttggtgggactgtaaactagttcaaccattgtggaagtcagtgtggcgattcctcagggatctagaactagaaataccatttgacccagccatcccattactggctatatacccaaaggactataaatcatgctgctataaagatacgtgcacatgtatgtttattgtggcactattcacaatagcaaagacttggaaccaacccaaatgtccaacaatgatagactggattaagaaaatgtggcacatatacaccatggaatactatgcagccataaaaaaatgatgagttcatgtcctttgtagggacatagatgaaactggaaatcatcattctcagcaaactatcgcaaggacaaaaaaccgaacactgcatgttctcactcataggtgggaattgaacaacagaacacatggacacaggagtgggaacgtcacactccggggactgttgtggggtggggggaggggggagagatagcattaggagatacacctaatgctgaatgacgagttaatgggtgcagtacaccaacatggcacatgtatacatatgtaacaaacctgcacattgtgcacatgtaccctaaaacttaaagtataataataataataataataataataaaaagcttttcctagcagctggtcagtttaccatatagttcattaagtgaattccaaccactcatgtggtctttcaagtgaagtggagaagacagaggtcattcatttcattttatgaggcaaccaaggcccaaataaatgaagtgacttgctgaaaggcataccaaaagtcagtgacagagccagtgcttgaatcaggtatctgacgttaagtcaagtgctgtttccattttatcccatgctcatcatggtgactggaggctgcaaagtcagagttcccgtgattctatcttggggtgttgctctgaaaccttctaaacctcctcttgaactgatttcacagcagtctctggaccgtcctcttactaaggactatcttagggatccattttataagcaaccattgacttctatcagcctcttctttccttatcatcaatacctactgccattcacatccgccatccttgggagctggtcaaggtggaccaccacagtgctatatcatcatcggcagttccacaagcatttggtattagaggaaaggagaagaataagacagagctcagtccagtctgttccccttcattctttgaatatactatttcttctttctggaatatatcccctcccaaaccttccaactttggcagttcattgctctttcctcagtgtttccacaacactttgttctcattcgtgtcataactcatcatgtaaccacaatgatttgtctctatcatctccctaccgggactgtgagctgttcacctcaatggtgttaatacagtcttcagtctctttgatttccctgagactgtcaactccttctctctctctctttttttttagacagagtctcactctgttactgggctggagtgcggtggcgcaatctcagctctctgcaacctctgcctcccaggttcaagcgattctcaggcctcagcctcctcagtagctgggattacaggtgtgcaccactatgcctggctaatttttgtattttttgcagagacagggtttcaccatgttggccaggctggtctcaaactcctggactcatgtaatccgcctgctttggcctcccaaaatgctgggattacaggtgtgagtcaccacgcccagccaactccttccttttctttgaacctctcttcttctttccggtgatactccacaatcctgattcttcagtctttttggacaatctttagattcacttttggcttgacttttctcaggctctgaatatgtatgtctcaggatggaactcttggccttttgctctcttcaactctttgctttcagcttcaactaccgtatttacttgaaggtgtccaaaatatccattctccaccttcttcgagaactcattcccatacccatctcacagatcttgtggtcaccccagtttcagcaagtctaaaaccgagctccttgtcacctccttcaagccagttcctccacatgaggactccgtttctgtgaagatgctaccatccatctttctcgatttgccatcactccaaactcctttccctcttcttgtatgcccattgtctcttaaatctgtctcttttctcacccccatcctagaaaaaaatgggttctgaagtcaaatcgattcagctctatcacttatgaatcacgcaagtttggcaaacttattcagagtcttccacttctttatcctaaattaggggtaataatagcatctatttcatagggtttatctatgaagattaaatgagatatcgtggaggaaagtgcttagcccagtaactagtatgtattaggcactcaataaatgttaattattattgttatccttatttccttatacttagactattacactagtctcctaaccaatctctctgcctcctctggtcattattctctccactgggaggggaactaacatggaatatctattaagtgtcaagcacctcatgctgaaagcaatcttatacagtaatagtagcatcattttataaaaatggaacagagccaagatatgaacataggtctgacgctaaagcctgtgcccttttttcatctccaaattaccacgtaatcataaaatactattttcacacatcatcctgcttaaacacacacatacacacacacacaccacacacacacaacctttaatgaccaccctcccccattttccttcagaacacaacccaaatttattatcctagcattcactgtcttgtacaacttccctcacttcccaacactttcctataggaaccctgtgctccagagaaacttatctgccgcctcaggcacatcctgtacaccctcaacttcctccctgaaatgccctctcctctcccctcccctggtttaaatccagcctttccttcaggtcctagctagagtcccaccctcctccattacactttttcctaacttccccagcccctcatcaggtctccctcgacccctggagcagccgcctgtatccttgttgacacgtggtgtttgccattctgtttttctttgcgtttatgttttctcatcaagctgtaaacctctgcactccaggaaatcggccttctcttttttgtttttgtttttgggtgtttttttttttcctttcagcatcccaagtagcccagagccctacaaatagaaagcgcttgataaatatgggttgttttggatgaaagatgatcttcccagctggatgagctctttccctctaggggtgagggactgagcttcacctcaacttcacctaatgtctcacaggaatgccccctcttaaacgctcctcaggtcttctctacccctttcccccaccaccccggcccaggagagccactcagagctccctctccggagtcaccctctcagacccagggctatttctttagcttgctctcgaaccccgcctttaccccagagccgctcctcagtctcctcccccaggctgcctctcaggccccctctcctccaatgccactccctaggaccctctccccagggttccggacccccaaccccggatatgttcccccagggccatccagttgttctacctccaggattactgatttagcctcttccccctcctgctcagggctacccccagaccccgacctccagttccaccccttcggaccctgcctctagaactgttcttttagcctctgcaaccccctccccagcgccgctccgcggcccctgccccagggctggtcggggagccactgccctcgcaggtcccgcccgggtgctgcccccgcgcccccggccgccccccaccggggcggggcgcgcggaggcgggggcgcgctggcggccgaggcggcggcggcggcggcgaaggcaggcgggccgggcgcgggccccgccgccgggatgccgaggagccggggcggccgcgccgcgccggggccgccgccgccgccgccgccgccgggccaggccccgcgctggagccgctggcgggtccctgggcggctgctgctgctgctgctgcccgcgctctgctgcctcccgggcgccgcgcgggcggcggcggcggcggcgggggcagggaaccgggcagcggtggcggtggcggtggcgcgggcggacgaggcggaggcgcccttcgccgggcaggtggggctggcgcgcggggccggggcgcgggctcggggcatccgggcagggcggggggcggcaccggggacgggcctgggccgggccgcacctactgccgaggtcgcggaggcggcgcgccgggggtccgcgccttgggtccgggctggcgcggcccagggcgggggctggggagggcctcgccgagggccgccgaggccgggagctgcttcagcaccgcggacaggggcagcgggcgggggccgagcacgagggtcgggtttgttgtgttggcagtggggtgtgtggcctgcatgactatgtgcgagggaaaccgtacaacgcctcggagtaaatagtaagcgcagccagtctgttgtgggttgggagaagaaaccgaggatgttcaagctggagaagggggagggggagggcggaggaaggactcgatcactgtcttcgtagctgaagggctgtcaggtggaggtaggatagacttgttctagcttggccccacagggcagaactagggccagcgggagtgggggttgcaagaagacaaatttgggctcgatataggaagaagtttgtaacaattggagctgctcaaccagcttaggaggcggcgagctgctcatcactggcatgtgcaagtaaaagctctcggaggggattggatggaggcatgcataatgcttgcatggatgcatacatcatcatcacaataatgccagctagcatttactgaacactcactatgtgccaggcctggtgctatgttttatacgaattatccaattcaatcctcataactactctatgaaatagctgcaattattatccccattttacagatggggatacagactcaaagagcttaagtaacttgcccaaggtcacacagctagtgagtgatggaattggaattctaacctaggcaggctgactctagtctccccttatttacccatgaccttatcctatatctcatggggggtgcagttggactaatttctctagtatcttccaacctagaggactgcaatattctaataaatgatgttgggacaatggtgttttgctgaggaaaatcagagtgatagcctcgccaccctaagagatggagtatatttgttgaagcaggcagtctgtttgtttagaagaatctgcctcaagagatattcttaattgggcatggagctcagggggtcatacgtgcactgaaattgcgtacaaatttgtaagtgcaaatgtgtgtatttctaggcgaggacccctagatttcttcagcctctcaaagggttacaggttccacaaaacaacaaaaaagatatggtgtgtaaaagaacctttagtgccagttggcagttgtcctccaaagattttataattgctggttgacttgttgtggaaactttgcttagcctctttgtgttttcacatgtgttttatcacatgttaaagtaatgcatttcctaagtttataccctagaagaaagattgctttagactgcctgagtgcacaggatgaggtggaaagaccctggcctgggattaaggaggcctgggctctgatctgaccttggcccccattggtttgtgtgaccttgagccatttccttgccctctctaggcttgaatttcaccatgtctaacataaagagatagagctagacaatctcaactctgaaacttttttattcctacaatatttcaagcattaagaggaagctagtccttacctgtatcagttttataggctttgattattccacctcttagcctttgtctttttaaacttaagtttccccctatgacacgagacccctagaatagccacactcattctctgggtcattttagttgtccttttctagataccttttggccctaattttcaatagatgtcaacttgaccattgtctccagatacaggaccctacggttttgcataaaggaaggttggtttcttctttgctctcctggtcccatcctgcttcccccttccctctgtcagctttcctgatctcaacacactaggccactgcctttagggaacaatctataatagctcccggagccttttcctgggtcaaaactgatagcctggaacacaacaccctgtatgtggattatttttatcggagtgcattaccttacatttctccaccttgacgtttgtctgccatcttgcattgcactcagtaacttccttcaagcattcgctcactctctctctcccttcctccacctcttcctccttccttctcttttggcatagcatttccctgtctgaaagggcttaatatgatctgaagtcttgaaattttcactttgctatatttcttctggatcacttataaaaaatttaagtgagacaggtcccagcatggtctcttggggccccctgcactcttaatcccctttcattcacggaagtgaccatttatatctatctattgttttctaagtgacaaaaacatcatccttaatttgacaatgactccattttaaatgtctaatacattgtccaaaacttcctgaaagatagacaaattatatccactgcttctctcaataatttgtgcctaattatcctttcactgaacactaggggatcacttgattgacaccttatagaaatattgttgcttttaagccggcagataatattgcttactcctctttctgtcttttaagccctctggagtctgtctccaccctacccctccattagcaggccatatttcccactgcttattgataacgcatccttactcgacaagctcatctctcctttacccttagacaggctgcccatatttctctggacattgtcacatagttacttctgcacccctacccgttcatttgaaacctttccttaaagtttcagctcaagccctgcttctccaataaactttccctgatttctctagttgtcattttcttctctcttctccaggaaacatttttaaggcagccccagccagtttgtcatttatttatttacttatttttatttattttatttatttatttttgagacagagtctcactctgttgcccaggctggagtgcagtggggtgatctcggctcactgcaacctccgcctcccaggttcaagcgattctcctgcctcagcctcctgagtaactgggattacaggcatgcaccaccacgcccggttaatttttgtatttttagtagagaagggttttcgccgtattggccaggctggtctcaaactcgtgacctcaagtgatccaccttcctcagcctcccaaagtgctgggattataggtgtgagccaccgtgcccagccctatttattttttaatagttaaacattatttttggggagaggaaggttggttcttaggcaaggctttcttgaccaaaatgttttatttttttacattgaacaaaatccctgattctcaatgctcatcattaagtattcaatgagcaatcaatgattctactctttatcctttatctcaaaaagttacatggatctgaaataggcactcatgggcatggggctccaagcccccttctaaaacccttcttagagatgggactcattgccaacttgtactttcttcggtagaaatcaagcctattccttttggcagtggttccacaagctcacccttgagttccttcagaactctttaggtagtcttctaatggtagtggcatcaatagaaagaaattgagagataaccgtgaccttagagatcacccagtacctactacagcacttactagatacttctttaattgagttgcccaagggcacagaacgtgatagtagatgattcggaactactgtagaacttttcctagttctcctgatttctaaattgaaagcatttttcatcatcattgatttttcatttcgtatctatgatctttcattaccaagccaaaaaatttttttattcagtctatcttctcctttgctttatttttctccacaccccacaacccccgaccccttgaagctcaacaaacaggatcctatgctttctttagtctttcttttttatcttacacatcaagaggtcccactgattctctaactggcttccttcatttgatttattaaaagcaccacttctcttatttgctgagtagaatgctcctcaaatacttttctggccttcctagtttccaacttgattctgaggaagatcagaacaggatgaaagagacaagtcaattatcacaggccacatgaataagtaacagagtgtgactcctagacccaggacttatggattcctgcccttgagactggttttgagtggtttgtgctgaggagatggagaacagtctttggtttgaaactgtagtcaaggaagattgaccccgaatgattggaggggtaagagagtgacctactaagaagcaccaacgtattcccaaatcaaaatattctttcactgtgatcatggcctccagtatatcttcattcttgtctggaaaaaaaaaactcactattaggaagttttcccttttacataagctggatctagtctactgtatttttaattcattttctcttatttttactgtggggtttcatattactttaatagctgtttatatttgtaaggtgctttgcacttcccatatgccatgtatgtggccctatttggtcctgggaacaataccatgaggtagataaggaagacattgtcctcattttataggtgagtaaaaggagactcaaagatgatgtgaattgcctatcatcttgtctaaggacccacacatagctcataaacattaaagcaggccaggcatggtggctcacacctgtaatcccagcactttgggaggccgaggcaggtggatcacctgaggtcaggagtttgagactagcctggccaacatggtgaaaccccatctctactaaaaatacaaaaattagctgagcctggtggtgcatgcctgtaatcccagctgctgaggcaggagaattgcttgaaccccgggggcagaggttgtagtgagccaagactgtgccacttcactccagcctgggcaaaagagtgaatctccgtctcagaagaaaaaaagaaattaaagcaaataacagaagctaggttttctgttcttgggctcagcactctgcccactatacaagtttcctgttctggattattattgtagccttttagccagtcttttctactttcaagtatgtcctactctggtccttgaaagaggtatttttagaactaataaaagtaaattataattgtacccaaaagactaatcttaggaaatgcctagccctatagtatggtattgtttgaactcaaaacaggaagaacaaaccacagccaatatctcctcagtacctagcacagtgcatgatacattctggacatgtgataaatattttaaaattaattttgttatctaatccccatcaacttctttgaatagtgcttggcacacaaaagtcgctaccttttgtgaagaataaatgaatgcatgctagaggtataacaaggtgccgggaagcaccgaagagggaggagatgaggttccccagttgaggttcgggaagccagagaatgcttcaggaagaaggtggtatctgagatgaacctttgagggaggagaatgatggagaagggtgagtggggcagtccaggcagaataaaaaatatgaaccatggctccacaaaaatgcatggcatgtttaggaaacagtggataatttgatgtgcctgaatcatcaagttacttgctgtttccagtaagagtgtataaggagaagaggctggagagggagactgagagcagattgtgcatttggcttttgtccaaaggctgaggggagtcattaaaggtttctgagcagaggagcgacctgctcagagccatgttgaggaagtggagggactggagtttgttcctgagttgttctggctgctggctcctgccctgaatgcttttaagctttcttagcacaacttaggggcgagtactcattttagggctcaagtgacccgcccaccttggcctcccaaagggcttacaggcatgagccctggccttgcctgttagcagtaatttaaagactcaattctatgccacaaacacttacgaggcataaagggcaccaaaagtacttggccagaaagtcaggagttgttctttactcctttctctctttatacatatgtatgtataaagatcatttgaggccaggagttcgagaccagcctggccaacatggtgaaaccctatctctattaaaaatacaaaaaaattagctatgcatggtggtacatgcctgtagttccagctacttgggtggctgaggcacaagaatcacttgaacctgggaggcggaggttacagtgagccaggattgaactactgtactccagccaaagcaagactctgtatcaaaaatcaatcaatgaatcaatcaatcagtccactcaggagtcagttatatctgaagcctatatggcaaaaactaatgtttgacaaagctggctggtgattttccaatatatattgttattttatgcctttctgaatgactgaaatattgaataataaaaaaaattaaaaacaaaccaaaatctgatcaccttactcccaccctcacctggcttaaaatgactcttaggacaaagattatactattattactgtactactatcacttcttccttttagttttattatggaaaactttcaaatgcatatgaaaatggaaagaacaatattataaactcccttggacgcagcacccacaaggatcacttgagtccgggagtttgagaccagcctgtgcaacatggcaaaaccccatctctacaaaaaaatacaaagagtagctgggtgtggtggcatgtgcctgtagtcacagctacttgggaggctgaggcaggaggattgcttgagcccaggaagctgaggctacagtggacagagatcacaccactgcactcaagcctgggccacagcgcaaaaccctgtctaaaacaaaaacaaaaacatgcttaatgaagccgatgaggccctgcatgactgagtccttcccatctctctgacttccttttataccacccattctccccattggtcactagactccagtcaccctgcccttccctctctttttctaatatacaggctccttcccattcaggaattcagtaaggtactctttcctggagtctcattctcagccttcacctagcctcttctgttcattcacagatgtcagctgagatgtcatgtactcagggaggccatccctgatatcacagcctatatctcctgccacacacttttgtagctcctggttcttctctttcattccacttatcaccactgtaatgaaatgtttagtatttccatgtctatctctcccaccggctgtaacttccatgaggatgagttcaaaggggactacaggcatgtaaaccattatttataatgtaatacaaaatatgctataaatgaggatacatataatgccattgggagcacatagaaagtccatttaaccccagacagatagccctccctgatgaagtggcattcaagttgcattttgaagtagcgcaccatggggaggccagagtacatatgggaaaggagttctagggagagggaatgaaataaaggcacagaggcaggactctgcaggatatgctcaggcaacacaattaggtcagtatagctagaggttggggtacttgaggtgagcaataaagggtagaaggtacaggacagaacatgaggctggcagaaccaggcatggtggctcatgcctgtaatcccagcttctcaggaggctgaggctggaggattgcttgagaccaagagtttgaggtcatagtgagctatgattgtgccactgcactccagcctgagcgacagagcagaaccccatctctacaaaagaaaacagggctggaaaggtgcattggcatcacattgtaagggttgttgtgtcatgctaaagaatctggactttaagactggcaatgaggaaccagaagatcggcttcacagtcaatccacttaggctaaaataatggaactttttaacatgacttacaggttatttagttcaaccatctccctgttgcagttaagaaactgagacttggtctggctgtggggctcacatctgtaaccctagcactttgggaggccaagctgggaggatcacttgagcccaggagtttgagaccagcctgggcaacatggcgaaaccctatctctacaaaaaatacaaagattagctgtgtatggtggcatacacctacagtcacagctacttgggagactgaggcaggaggattgcttgagcccaagaagttgaggctacagagagcagagattgtaccactgcactgcagcctgggccatagagtgaaaccctgtcttaaaaaaattaggccaggtgcagtggctcacacttgtaatcccagcactttgggaggctgaggtgggtggatcacctgaggtcagaagttcgagatcagcctggccaatagggtgaaaccctgtctttactaaaaaatacaaagaattagctgagcgtggtggtgggcacctgtaatcccagctacttaggaggctgaggcaggagaatcacttgaacccgagaggcggaggttgcagtgagccaaaatcacgccattgcactccagcctgggtgacaagagcaagactatgtctcaaaaaaaaattttttttaatttaaattttaaaaaccctgaggcctggccactggtctttgtcttcacttttcccttttcttaactcaccaagaagtcgagcctcaggggacagaaaattagcagatctgcgggagggccttggacagggtgaggaagactaaggcctctccttttccagagagtgaatgagaccatggccacactcctgactgtgggcagaggcctccccagaactgcaaaacttggacatcccagtgctgacccaaaaccccaaatgtgccacctccccgggtatggtgatcatctggcttgtggtggcctcctgggagtgggccaaggacattctgcagagcgccagggaattcccgctagtgcacttaccacccactcaagagccgatggcagccaacaggcaatgctgcgccattaaggtgtttgtcaagaagctaagctgggcattgtgggcgatcctgagggccctttttagattggctgtaagtgaagaaaaaaaacagcatttggaggcaaactagagctagtgcagagggtgtagcatgacagaaaaccctctgagaggcagagatgcttgcctccatgtctggcttccttaccaacttgctctgtgattttgaataagtcatttcccctcccggagttttctttctctcttctgcaaaacaagtatgttaaattagatgatctctgagtattggtgaccagtgcattttctagatacctgaatgattatgccttcagtatgaaattttacgaattagttatataactcaggtgggctcagcagcaaggctgggacctcagttatatgggtagaggaggaagcagggttttggtgggacaagaagtggagggaactgacacagtgataggacccatccctgaggagtcaccagaaagacccagtgatttggtctggcagcaataaccaaacgtggtggtcaaagaggagaaatgacttattaaaaatcaccaagggctgggtgaggtggctcacacctgtaatcccagcactttgggaggctgaggtgagtggaccacctaagatcaggagttcgagaccagcctgactaacatggtgaaaccctgtctctactaaaaatacaaaaattagccgggcatggtggcgtgcacctgtaattccaactactcgggaggctgaggcaggagaatcacttgaacccaggaggcagaggttgcagtgagccaagatcgcaccactgcactccagcctgtgcgacagagcgagacaccatctcaaaaaaaaaaaaaaaaaaaaaatcactaagagcaagttggtgggggagctgggaatggagccaagcgtctctgcctttcagcggttctttccaaggagtatgggagcaggaatagacaataacattgtacgaacacttactatgtgccagaatctgctaaatgcttcttgctgctgtaacaaattaccacaaacttatttctaaaagcaacacagacttgttttcttacatttctggaggtcagaagtccaaaatgggtcttgctggactgaaatcaagttattggcagggctgcattcctgctggagtttctaggagaggatctcttccttgccttttccagtgtctagagaatgcccgcatcccttggcttgtggccccttctagcagcagcagcactgctataacctatgtctcccaacaccttctctgactcaaaccccctgccttcctcttataaggatgcttgtgatttcattagacccacctggataatccgggctaatctcccccatctgaagatccttaacttaatcatttctataaagtctcttttaccacataaggcaacatattcccaggttttggggattaggatgtggctgtctttgaagggtcattattttacctaccacagtgcatcatctcactgagtcctcctaacagcccttctttaaacatctgtttaacagatgaggaatgtgatgcttagaggagttaggtcatttgcccaagggcactctgctggaaagagaaaagttaggtaatatttggtatgtggtggcatcttggtcccaagtgagctgtctttttagataggaccccattcagctcccaagtgtattgagaatacagtctaactctgtggaggaggctgtctaagaactaggcagggaatctgagaccctgaaaaatagattagggtcacagcagtctcagcttagaacttgaatgctagagagagaaactgagggaaaaaacccagttgtaagcattaagccaatatagcaatggatgaggaagaatgatcttaggccaccattcatgcctgcatacagtgatacaataatatcttagtgttgggggttgaagctgctgatggaccatttgctcaagttaggattgaccaaggagatggacaaggtgagggactcagagataactgcagagccgaggcacagagagcagaggctggctactgagccagtgctaatagaagacttttctaaatgggtaacatagtcaattataagtgacactgaacaacatgtccatttcgtcatggttatggcaggccctgtgctagctgttggggtgacaatgatgaggaggacatatatgcattttagagtcaggaggaagcgacagatatttcaacatgtggttacaatacagtgtggtaagaattgcgataaggaaacagatgggggactgacagggatgtacaaggaccttctgaaatagatgtaagaggccaaggctccccaaagagggaggaggggagagtgaactgaatagaaggaacaatacgtgtaagggcctgggagaactggaactcactggaacacagagcactaggtggggaaagataaaaggggttgcagagggagtcagggaccatatcataaaggctcttaactgcagagatggaaagctcttagagccacctcagggcattcacacttactgttccctcatcctggaacacgctttcctagtagccacagggtccactccctcacctccttcagatctcttgctcaaatgtcacctgctcaaagagattgtccctgatcaccctccataaatagctgtcccactctccatctctccaaccggctctattcttcacagcacttattcccacatggttcttccactagaccataactactagaaagtaactagaatgctgtttttggtttttgtttttgtttctgttttagacatggtctcattctgtcgcccacagcccactgcagcctccaactcctgggctcaaggatcttcctgccacagtctccagagcagctaggactacaggggtgtgtcaccacgcctggctacttttttcaatttttttttttttttttagacagagtcttgctctgtcgccaggctggggtgcagtgccgtgatcttggctcactgcaacctccacctcctggggtcaagcgattctcctgcctcagcctcccgagtagctaggattacaggcgcacgcccggctaatttttgtatttttagtagagatggggtttcaccgtgttggccaggatggtctcgatctcttgacctcatgatctgtctgcctcggcctctcaaagtgctgagattacaggcatgagccaccacgcctggctgtttttcaatttttttctttttttgtagagaggtgtcttgctatgttggccaggctgggactagaatgtttttgtttgctcttttagccctagcacacagtacttggtacatagtaggtcctcaataaatatttattgaatgaagggacagaaataaacatttgatgtttaggaggtaggacccatagttctttggtaaaagactagtgtgctgtggctcacgcctgtaatcccagcactttatgaggccaaggcagatgtatcacttgagcctaggagttcaagaccagccctagcaacacagcgagacttcgtctccacaaaagattaaaaaagaaaaattagccaggcgtggtggcaaacgcctgtagtcccagctactcaggaggctgaggtgggaggatcacttgagcccagaagttcaaggctgcagtgagccatggctgagagcgagaccctgtctcaaaaaaaaaccaaccaaacaaacaaacaaaaaaggaaactggatgtaggcagtgaaggagagggaagagtcacaggtcatatgaggctgctggtttggacaactgggtagctgatggtgccataccctgacatagcacaggcatattgagctcactattgtctgagataaggcattgcactccaggagtgtgaggtataggaagtcctgggagggggaagggctgcctgtccaacactctgaccgtacggaatatgcctgaattctgccatttcttagctttagggctctggatacttgtaggcactgccagagctctgcctcttgccacccccattgccacttctaacctcaccaccacctctgctgtctcccgctctcttccctcttctgtgcacattttgttctccttggtattctctgctctctcctttcactgccaccactccgggacttctcagctttggcttctcaggaacccaaatcctgccttctggccggcagaccagtcacaccatattgtctatgatctctacgtctttggctcagcccagctattttggtctctgcttgcactctgagatttttcttactttcctctgggtttacacctctttctgcacttaaagggtgacagacatcttaagagttggttaactgagctgtaaaggttagacttctgacgtggctgatgattgattaatggatctaggtgtaaagagatgaaagcaaggtcattctgtctaaaagtgaatgggacttttttccttcagtgggttttatcttttttttcaaatggaacaatggaacctattgcctcatcaagcaaggaagtcaaatcacaatagattgaatttcagcaagtgttttttgaaacctctaatagataccaggaattgtgcttggtgctttcagtgtattactaaatcttcccaagatgaagtcccttccttgatatccaggcagtgcctcctagatcaactgttcattcattaactcagtgattatttcttgtgtcagacactgtgctaaatactataacagatacaaaaataaatatgacaccatctctgttctccaggaactcaatctagtgggaaaaacagacatatccatgactgggtatgatacattgtggtagctgtgtgtacaaagtactgcaggagtaaagagggcacccactagctctgacagggagagctaaggaagatttaacaaaggaggtgacattgagctagaccttgaaggatgagtaggagtttgctaatgtgcataaagagaatgggttttggaggcagcagaaacagcctggaactgtgaagggcagagagtgctttggacttgctatgactggaatgtagaacacttgctctagcctcaggagttctgcccagagaaggcagaggattgtctgggtcacagagaaagtgagtggcagagacaggattaagcagcatgaattagaattgtccgaccccgatccatcttccttagcctctaatacacacacacagacacacagacacacacacacataatgctagtccaacttcttgtcctgtcccctggcttag

SEQ ID NO: 367 - DNA, 58632 bp, Homo sapiens
gtcaggagttcgaggccagcctggccaacatggtgaaaccccatctctgcgaaaaatacaaaaaaaagtagccaggcatggtggcacacgcctgtagtctaagctacttgggaggctgagatgggagaatctcttgaacccagaaggtaaaggctgcactgagctgagattgcaccactgcactacagcctgggcgacaggccgagagttcgtctcaaaaaaaatttttttcttttttttttttttttttttgagacggagtctcgccctgtcgcccaggctggaatgcagtggcgcgatttcagctcactgcaagctccgcctcccgggttcatgccattctcatgtctcagcctaaataaagcagattaccctcaataatgcgggtgggcctcatccaaatcagttgaaggccttaagagcaaagacaggtttctcaaggaaaaaggaattctgcctccagactgcaacacagaaagttctgactgagtttccagcctttggactcaaaactacaacatcaactcgtacctgaattcccaacttgccaacccccacaattgcatgagccaattctttaaaatcaatcaatcaatctcgcttgctcagtgggcctcttggttctgtttctctggagaacgtaacacagatttttggtacggggaatagggtactgctgtaacaaatacctaacaatggggaagtggttttcaaattgggtaatcggtagaggctgaaagaattttgaggcgcatgatagaaaagcctctattgtcttgaagagccttggtagaagtatgggcattaaaggtgattctggtgacggctcagatggaaaggagaaatatgttattgaaactggaggcaagtggtagagagcttgcctgaattgtattctgttgggtggaaagtagaacttataagtgataagcttggacattttgctgaggaaatttctacatgatggttcaaagtgaggcctgggccaggcgcggtggctcacgcctgtaatcccagcactttgggaggccgaggcaggggatcataaggtcaggagttcaataccagcctggccaatatggtgaatccccgtctctactaaaaatacaaaaattagctgggcgtggtgtcgcgcgcctgtagtctcagctgctcaggaggctgaggcaggaggatctcttgaactcaggaggcagaagttgcagtgagcagagatcacgccactgcactccagcctgggcaacagagcaagactccgtctcaaaaaaaaaaaaaaaaaaaactgaggcctgctttctccttattgcttatagtgaaatgtgagaagagatacactgaaggtggaattattcaacaaaaaggaaccagaacttgaagatttggatcattcttatactcacattgtaaaaaaaaaaaaaaaaaaaaaaaaaaaaaaaaaaaagagagagagaaagtatgctctggagaaacactaaggatgtggacaaccatttatttgcaagagattaggtgtgtggcttatagacccaatcacccatctccacagaaacctggacagttttgactagggtacatagatgggatgaaatgaaggaaggctgttggactcccaggattccacaggtaggaaagggattggcaggggcagttcagaggccagtgaggctgcttccgccaccacaggactgaaagggacaggcttgggtttgaacccacggccaccacctcctcagttctgagggtgcggggctgcaaccccagtgggccctgaggacagaggatcaagccagtgaggattattctcaagccttaaaatcctgtcattggccctgttaggtgtcagactttcttggcacctccaagtctttttccttcccatttctcccttttggaatggaatgtgtctatcctctgcctataccattgtaattggaagcagataacttgtctgttctcatgggttcatagatagaaagaaaatttgctccaacaggaaacctaacccagagtcaattgatgtggatgatttgggtgatgagatttgaactgatatttagatgatactggactttgagttgatgctagaatgactgacttttgttgatgttgagatggggtgaatgtactttgcatgtgggaaggatatgaacttgtaggggccagaggacagactatgggttgaattgtgtcccccacccctcaaaaagttattttttttgagacggggtcttgctgttgccgagactggagtgcagtggtgcgatctgggctcactgcagcctcaacctcctgggctcaagtgatcctccctcctcagcctcccaagtagctgagattacaggcatgccaccatgcctggctttttgtatttttttgtacagacggggtttcaccatgttgcccaggctggtcttgaactgctggacttaagttgtccatcgccttggccccccaagtgctgggattacaggcatgagccactgtgcctgacccaaaaagatattttgaagtcctaacccctactacctcagagtatggccttatttggaaacagggtctttatagaggtaatcaagttaaaattaggtcattagggtgggcctaatccagtaactggtctccttataaaaaggggagcacacacacttgtgtcaatagacacacaaaaagcaccacgtgctgatggaagcagagatcggatttatgctgccacaaaccaagggatgctatcagaagttggaagaggcagctggacacaacgccatggagcacatgtagtcccagctacttgggaggctgaggtgggagcccagaagtatgaggccaacctgggcaacatagtgagacccaatttctaatatataaaaataagttggaagaggcaaggaaagattcccttatgggtgtcagaaggagcatggtcctgcccacaccttgatttctgacttctagcctccgtaactgtgagacaataaattttttattataagccacctaatgtgtggtactttgttacaatagcccctattgttggacatttagagttttaagtttgggcttttatagatacaacttaaaacattcacaatctatttccacaggttaattcctaggtataaattggtgggtcagaggatatacaaggttctgaaatttaagacagggtctcgttctgtcatgaagactgcagtgcagtggtgcaatctcagctcactgcaacctctgtctcccaggctgaagcgacccacccacctcagcctcctgggtagctgggaccacaggcatgcaccaccacacgtggctgatttttgtattatttgtagaaacagggttttaccatgttgcccaggctggtctcaaactcctgagttcaagtggtccacccacctcggcctcccaaagtgctgggatcaccatgcccggccaattctgaggtttctgattctgattctgaggtttcaattctgaggttgtgttaagttgccctctataccaaagtattaaattatctccgccaggcgcagtggctcacgcctgtaatcccagcactttgggaggccgaggcggatggatcacgaggtcaggagatcaagaccatcctggctaatatggtgaaaccctgtctccactaaaaatacaaataaaattagctgggcatggtggcaggtgcctgtagtcccagctactcaggataccgaggcaggagaatggcctgaacgcgggaggcagagcttgcagtgagccgagatcatgccactgcactccagcctgggcgacagagcaagactctgtctcaaaataaataaataaataaataaataatctccagcaccatgtgagagaccattccttatactcagtaggtttgatagtagggtttgtgtttgtttttaatcattagttctgatttaggtaatcaagatgtccagccaaagatatactacaagttgggtggaacattatagacttagatactggaaagatttggtttagtttcattgtttttagatttgtctgcgcttggtttcctagagagtgctcaactcaagcaaggagggaataactgtaaataaaatgtgtccaagaatagatttggaaaaaccaatcacagtggaaataaatattagctttattaacactcaaagtgccattcatttatattcattccatagtccagaaggttacttattagagtaagcctttgcaccacaatctttcaaaaaaatgaacatgtaagaaaaagcagttttcattgtgctaattattgcaggccttcatgcacgtaaacctcaacaaaatgtgtgccaacaatatacaaatttccatataaacaaagtcattgatcactaacaaaatataaacatggtttcttttatattagatttttttttaaaaaaaagctatttaccagcaagaaaaaacaagtacctagaaattataaaactcagaaattgtatacatttttacaagcacaattttgaatgacaaacaaaatcaaaatgtgcatgaaatgttgcacgtaccacactgtatctggcttctggtaggttttcctaatcacactggttccttttaacataataagcttagtgacattcaacttcaacagtggactttattcctaacacgagtaattttacatggtaccgcatatttaaaacaaagttttctttaatactacattgtctgattggaaatttcatttccaattctttttctgccagttacttaaaacacacagtacaatataaagacacacaacgtatgtttggacatttcaaaaccaatttatagtcaattacaaagaatcacaatatgccaatatattgttttataaacccagtctgaccttgcccagtgatagaaaaactaaaagttgaaatcttttggggtggaatacaggaaatattcaaagacaacagtaggacaggccaatagcaactggagatagaaaaatcttgacatctcgagacaatttagtttctcacatttttccatagctctgagaattcaaaggccatttttagcggtgtgtttttgctactgcttaaaacctatttttcccttaatttgcatttcacggaattctcaaagagaatttaatgctttttcttgcaagagtattttaattgagctctaagtatgacttgcattcaattctgaaaatacaaatacattttgaatggctaaaaacaaaattttaaaaatacttttgatcagccagctgaaaatatattcatatagtaaataatctctcagaaagcttttatatatatttaattatcacaactaaacagtacccttataaaacaagttcataaaaatgtagaaatgaaatgaaaataagaacttactgggatatatacatgtgcctacagacagaaaaaaacatctccacacaaacatacatcccctgatacacagttaaaagcatactttcaacttagtaatggattttataatacattataaaattttctaatttctattaatgtcgaactcctgagttcttcaacaaagaaccatagataagtatagtttgtaaaagcaaaaaggtccatttaagtcagtaatagcagtgcagtaactgatggctacatcttgaaagaagttaaaacataaagacacagacagtagttcaatgcacgcattcatgatgctcatacactcatcaacaattattggtcagagtagtaaatcagtgtacaaattaaacatttccaaaaatgtgcaaaaatgtcaatcttaataggaaaaaaaccctttgtacataattataaactgcccagcattcaactgagattaaaaacatttagagagaaaccaataggttaaatatagagaatttaatggctacatttaaaaatgtacattattatgtcaaagggtaaatttacaaattgataatcatagtttgcaacaattcaaagtttattctcaaatttatccaagtttacttttatttacaatgaataaaaagaaccatgtgaaatgtaagagatgtcagacattaaaagtatttttggtattaactcttataatatttcagaattcagggtagcaaattttaaaaccaataacaatagaaaaaatgtaaaccatttactaattaagattgcattaaaacaattgttggtctttaaagaagtattcttatccttagacactgtactttcaattgaatagggtgtattgcaagaatttggcccacttcatattgcccataagcctctccagctcaaatgtttcaactagtcctctcttcttattccaggtggaaaaaattctttggaaaagtaagaatacatcaaatccattttgtagtctatctaatagagtttaaggtgtaattttgtttcttctcccctccaagtaaagctaatgctaaaatcatcactagttacatatgcttttaaaaaataaattctaaaaaaatatttaaaaagaagtgaacttaaaagtgcttttcggtatggtcatgaactttactgttctcaactgcattaagggattctcaactgcattaagggattcagaaattatttggggacaagtcctgtacatatagtagaagcagatacttccttatgttccaaaatgtctatggcacaaagcagacatcagtccagaacctacttttcctcacagctttgctgaaatgcccctcaagtcaaacataagttcataaatgttaagacactaggaagaaagttcgccatcaacctgaggcatcagacgttaatgtctgtctatgtgaatcagtggtcaagtgacattaacaagattggcacatgtacaagcttaaattcatgtctacatagttcctcaatagtggaagtaacttctggatgtctaaatgcactgatcacctgtccttttccttgaaggatataccagaatacaaattctactagtatctgctttataatttttatactattagcttacaagtggacagaagtaacagtgctaattattttggctatgtgtacagggaatataaaagctttggtttaaagtgattctgataatacagattgtgttacaaacaagaagtcatcaggcagaaggaacaatggtactgatttaatgcctttgctgttattaacaaaaataccatatgactatcaattaaaatgcacaattatgaaaaataagaattctatgagactgtatacaggcaacagataaaatctattcttttctttactgtagctatgactcctccctcatctttctgaagctcaaccttgaatgcttacaggaccactgaaaaaagaatctctaggctcccccaagagctcatttccatcaacagctctggaaggtgagtatgggaagatgggaggccctgatacttcccacacctaccatggcatcctgtccaaaccatggcagaagtcaaagccaagccaaagacaactataagtaggaatagctgcttcacagcatgcttcccctagccaaccaaaaagaggtacaagagaatttccttgtgaatacttggtaagctaaggaagcttattttgataatgtttggcagaatttcagttccaaaaagttcaggaagaactatgtaaaatcaattactttctatttaagaattatatataagattattttacatatacacaaattgaattttaatctacctttagcaaccaagagtatggcaatttacaatcaatattattatacaatcatttgtactagctacttctggaaaatgtactggtgttcctacccaaggatgactacactcactgtatgtcatcagtaggtcatacatttgagttgttcttccaaaaccagaaactgacctaattgaacactcatacctttccccttcttccttcccatccctgcctccaactctaaccacacacacacacacacacacatgcatgcaaacgcacacatacatgcacacatgcacacacttcacagaaaagtaacttttctgtgagtattacccaaaatgttagctgagaattaaggactagaatctgctatccctggatttcctactcactgtcctatctcattgccttaacatttgtaaaccatgtgaatgacttctttagggcaaaaacaagtattgtaactctaccatgaaaatcataactgaactataatatgccaagaacttggacagtgccaatgtgattgaaaatcaaatattcaacccagaaaacatttacatgtctctttagaacgagaatacctctttctatgcttgtgttgggaattcatgtctagtggaagctgcagcatgtctatcacagacaaatcctaatgtttctctcctaacatttatttatttatttatttatttttttaaaaaggaggtagaaaagggtaggaggaggcaggcattaagaaacatttaaggaccaatacacagtctaaggccaaatgaacttgtgaagcctactgattttggaaaaaatcttcattttggtgggtaacttgaattattaatataaaataaaattaaggcatacagagaaaaggcactactaaaaattaacaattggattgcttttcattaacatttaaccaatcttaaaattcaaataaatatgaacattacatttgtaaaacaaaggccaaacttagtaataaaacagtatgatctcaaggaactgtcctgatcttagtataaataacactgttgacagagttcaatttctatcaaatgttttgggtattttcacaatttagaccaaaataaagtatgttttctttaaaagagacactggggaaaaaaaaaaaaaagaacaaaaaaacactgttatggaataaatgctccccatcaccagaactgttgagtagaggctgggttttgcagtaagagggggtcctgagagagatgctatgtgacctggttggggaggggatccctctagtttggagatacttttactctaatccctgttgtcagtgacatttccgtttataacagccaatgattacctaaaattgcttttcccttaataaaaaataacattttaaaacatcattgctgaactttcagagttagcgtatgccataaaataagtaactgtttgcccatgttcctcctagattgtgacctccttaaggatgttaatttagtacctgacataataagttacaattattgaacaaacaaagaagattcattctattaaaaaagatagatttgtatatttaattgacaccaggtgattttatatcaagctatcagttcccagactccaaataaaatcactggcacagaactttgccataggccaaggagtctgcatctggcttggtcatcctgctaaactattcacatctgattttattttctaagtgatttcacatatcttataacaactccatgtcagaaatactacagagcagatctgacatatatatgagctggagtagcagagacttagtctaaagaaatagtttcatctttttaatgcagtttctttgggaataaggtaaagactctctcaagtgaaagccaatccaattcactctgaaatcaaggtttaaaattttcttttacagttcagcaaatgcattaatattttaattccttatatatgttatgtaagggtaactgtgccttttaaaactttctaaggcaatagtcatttttttaagttagaaagatgttttgtaaacaaggaaaagtgctgaaaattttcaagatattcatactgaaattttcagtctgtatactttcaaatacattttaaataattaacaacccatcaaaatttccactagtcattatgatttttttaacccttttattcaatacaacattttgtttgcaatgtaaaagatcttatatttggtccaagcctaagtcatgccactttgaatctctcaaggccttaagtagaaagatatttcctgaaaagcacatataagactgctagtgaatcttctccagcaccaaaaagtctgccactgtcaaagcagaatgcattttaaaggcacaaagtcagcagtctgaccattttccagcgtcagcaaagaagcattacagtatagaagaatcaattgtgcatttaagaaacaaaacacatttagagttatcttaaaaagttcaaattgcatttgttgatccatatcattattagaaagaagaaaaaaacggagtgttatatttaacttcccctgataaagctgtttcctttcaaaaatttcttttttaaatttacttttggtcttccataccctccacccccacaccttcaagcttttttgttctagtagtttttatatatattaacttttattgtggtttttggtaccttcacaacttgtttgaaataaattcacatcgtattttatataataactctgtaaactattagtctatttttaagtctttacataaagaacattactttcccatagctaataatatttttcttataaagcaaaggccttccacagcagtgttaaagtagtagtttcttttcaggtgcctttattttctatagcatttagaaaagaaaacagagactgaaaaaaaaacagttttgctctgggttctacagtctcaccagatttctctctaaagagcatttgtctcatattgtgcactgctggttaccctgacagaccaaaaacgagccaaaggaaaagcacaactacacaagacagatatgaaggaaaagcccactggtcaaggaccatgatcttgctcaagtagaaaagatgccctcattcataaaagataaagaaattataatagatccacacacttggggattctttctagaacaaaatttggcagttgctttaccaaggcagggacacctcattcttgttcttccctgcaaactgcttcaattttaagaatatgagagaagcgttgacaattaattttgtgctttgacttcttagactagctagtggaatttcaaatattcctacagggaatgctaggtaggaccttggcacagtaaaccaagatctacctaacttcagaaacaaagtatcgtaaaagagtccctaaataagcacaccttttggcagaaaataagaatacctgagtcccttatgaatcccatgaaagggattctggggcctccaggaagactgttgttttctagacctttaaaataaagtactaaataaagtactaataaagtacttagcacttgctttaacatgctgaaaaaaactgcaagtggccaaattgctgatatcttcatgttttatagtagcacaattctattagagatagtggggcctttcccagctgtcttgttccatttaacaatgtccttgctcttattggatacattgtactagaaatacgtggcagctttttaaccttcccattagtagttaaaattttgttttgatatgcttttttttttttttttgcccaaaatcatgaattttaaggaaagaatatatagagatggctgagttcaaaaggctcagtgttcaaattcagtttgttcctaaaatgaagagttacctatgtgggtgcaatatgcagctggtaaagtgattgctatttgctgtttgttgagattattcacccttgacttaaagcagcagtatctgatcttgtaaaatcctcaatttgcattacatcactttctctttgcgacttccttttctttcttgcatttactgctttgtaaatagctgttttcagtttataactgggactgatctttacatcagggtttctcagcctcagcacttctgacattttgggaggggtaattctttgaggctgctttccttgtgtattataatctatttagcaacatccctggcctctacccaattcatgttactagtatccctccaattgtgacaaccggaaatgtctctaagaattgccaaatgcctagtgaaatcatcctcgctccacttttggcaaccactgtttcacatgatacctgtttttttgaggtgctttagtattctgtgatcctaagaacaagggtttcatctcctgacataacacataaacattactaattgaactcttcgctcctaagggatgttacctatggggaatcaggagctggaaatagaagatggtatacatgattttgattatttctccattcctttaattttgggacgtccccctcaagtaaaacaaaacaaaactgtttaaaatacactaaacacctaattttttttcattatttctattgactgtaaatgtggtctcttctactgctcacacatttgataagagtgatgtccttttgtcttttatttctatttgctcacaacttgactttaaaataaaggttttccgtgtgtgtgtgtgtgtgtgtgtgtgtgtttttaagcagaaagctatccctcaaggtttacagattccagtaacgtggatctattatagtgtatttgcttattatactggttaggattaacaaataaacatacctctcagagattcatatcttctatcaagactcctactgagcaaaaaggttggtagacagaggttaggatctaaagaatacagatataagaagaaacctatattctttaagttgagtacctaccctaaactaaagtttagggctcaaccccacaaatgaggatatattttaaatactatcactaaaaactacaaattatacatcattttcttctccttgttttccatgtcttcccatcgtcactgatgtgtcagtgatagagggaatgactctacaatctttaggtattccaaatgatttgtttgtactaaaaagagtgactatgtactaaagtgctttatctctctgaaccacatcagtacattataaaaattaaaaaaaaaaacttcaagttcttgtaagggaaaaaaagattaaatataaaaaatttaggatattattattattaaacaaatttaaccaagaatcaagagaaatactttccctcttgtcttttttctcccccatctctctttttttataaaaaagaaaagtgcagtcagagagaaggtgaatgaatagatgggagctaggtagaggcacaggagaggttactggctgctagtgataatgcacaaacatgtgccttaagagttcatcagctgaaggtctcagtttggcctctacaaaaatccgtttgaggaaatctcgagtatagtctgagacatgaggtggcagctttgggtttgttggctgagtggcgattttaaagatggcagccattgcttcaaattcagcccaaggcggcttttcagttagcatttctaccacagtacatgcaacactcctgaaaagaaacaaaaagaaatacattacacaaacaacaacatgaaagaaagctagttagctagaaaatgagaaacaggcattaagtccatatatatttaaatatgacttaatttcaagttcaaagtttcattaaaaagttctaatttcgtaaaactaatttaaacataaaaatcaattaaaataaatttaatgactatcacttaattcaaacggttgggcaaagaacattattcatcttattatttttgttttatataatttctaacctgattttaaaaataatttttgtctttatcttacaaagaatataagcattagaaatcaattgccttcaggtgcctaaaatgaatgtctattaaagtcttttctgggtgggaagtagaaaatggccatttcatgttctaacttaaaattataaaagaattaaagattaaatgaattataagacactgacaacaaagatgaagtacttttaaaggtctttagacaaacaaagtaactatttatttacttctgtaatagcaaaaagctttttaatgctgaggtttgctcacgacaaaatccttcctaaagaatggaggacaggttcaaggattctaactatttagtcaattataagcctcaataaggcacaattaatatagtgttaatcttcgcaattcttacgtcctattttggaagtacaaaagattatttacatctgcctcagtaattcaatcccaggtggaaatacataggcggcaggtggttttcaagcaaacttcgtatcaaaacctaccagatgtctgcttttcttccatagccttctccactgatgacttcagggctcatccagtatggtgtgcccgtgacagacttcattcctgtccctgagagacagatggtctgaagccgtttgctggccccaaaatctcctagtttgacgttgcctgttgaatctcgcaggatatttgcgcctaaaaataagacattgcctcatttcattaattttattggcagtctcgaatatagcataaaagaacaatggcagagaattacttcatagactctttgatttgtccccaaagttaggctgcttttcatcctctggcagtagctggcataatgctagtcacacaggtggtgctcattaaggatttgctgcaagaacactacatttttaggtcagctgtgtgtttaggacctaggacgtttctattgaaaaggactggtgcaggttggaggtgggggtgaagaggaggagaaaggggaaaagggctaagaatgaagctcagtgaaggaccaagaaagcccccagtttctctatcataaagcaagaagcccatggatgaagcttatttccctgagaagtcagccttttctcagaaacttccttagggaccttcagaacaaaagcattttccccctctattacttaaatttagttaccttacattttagagttttcttaatattgaatcttgctttatattaattttacttcccaatttctaatattttaaatgtctcataggcaggctttgagcttttcatttaaaatttcattagcttttataataaactttttagatagcttcagatttacagaattattgcaaagacagtatagagagttcccatatacccccacacccagcttctctattactaatatcttagtatggtacatttgccacaattaataaaccaatactgaaatattattaaccaagttcatactttgcttagatttcctcagtttttccctaatatcatttttctggatccaggatcctaaccaggatcccacaccatatttagtcatcgtgtcccctgaggctcctcttaggtgggatactttctcaaattttccttgtttttgatgaccatgacatttctgaggagtactggggtcaggtttttgtagaatgcccctcaattaggatttgtctcatgttctcataacgggggttgtaagttttttggaggaagaccgcagctaaactgccattctcatcatacgatattaaaggcacatagtgtcaacatcattgttgatgctgaccttgatcacctggcttaagatagtgtttgtcaggttctccactgtaaagtcattctcccccaccctttccgtactttggaagaaattcgccacgcacagcccacaattaaggagtaaagagttatgctccaggctgagtagctacataaattatttggagttatgctgcagaagagatttgtctcccctctcccacatatttattaaatcattcatttgcatcactatgaacatggatatttgttttatacactgggttataatccagtactactttatttgcctgctatttatcagtttcagccactggagttctttccactgactctgtgtccctttgccatacccccatcattgtatccttggcttttgttttggagcactttcttgctttctggcatttgaagatgctccaggctcatcttgtatatttcctgcaccagtgctagaatcagccatttctcaaggaggcctggttccttttagtggagaatggtattaaaaaaacaagatattggccaggtgcagtggcacacacctgtactcctagcactttgggaggcaaaggtgggtggatcgcttgagctcaggaattcaaggccagcctaggcaacgtggtgagacaccatctctacaaaaaaatacaaaaaaattagctgggcatggtagcatgtgcctgcagtcccagctacttgggggctgaggctgaaggatcgcttaagcccagagggccaaggctgcggtgaactgagatcatgccactgcactcccgcctgggtgataaagtgagaccctgtctcaaaaaaacaaaaacaaaaaaccaagcttgggcactaggctcacttgttttttattctctattttcactcttatcattttaaaaactctattttttctgggattataaatctagtttccgtcttttataaatcatttctcttctcatttttttccacatagccctcattactttggaccttctcatttttaactttttctttacctattcttaaataagccatttattttattatctaattttaaaattttacttcaattcttatttttaactcttccataaccttaaccatattttatattacaaagattcattttcttggttctcttacccttttcttaaaaaacggtctctaagaaggagactgaatagtggagaaaagctaccttacagactggagaggataaagagaccccacccctatcacggggcttctgtacctgtctttctgttctaccagcaaattccccagtctagtcaatgatggttccctaaagcctctctccagaggagagtccagggtccattctctgcacaccttaagtgtaaacatgccatgacattagtgatcttctgaaagagcactgtctaacatttcctaccatccagtactttaagaaggaatgtcaaaaaagccaccgtctctagaatacttaaccagtggaaggacaacaaagcccattttttactggctacaagcagggctctgataggggaaggaacagtccaaggcaggtcacagacaggggaagctgtctctggggcggaatcaccaatattgaaccaatgcttatccacaagaagggcggaggagaaaacgggtagccaggctccaacagaagtttctaaaaacttattttggacatgttaaaaataagttattaaggagacttttcagacatacacaaaggtagagcagcatgcgcagccatcacccagcctcaacatccatctggacaatcctgccccagccatactgccaaccactccccctcccctctctaggatttgaagcaaattcaagatgtcatgatcaacaaatggttcagtacatatctttcaaagataaggactcttatcacacccaagaggatgaacaataaattgttaatattatcaaatatatagtcggtgttcaatttgttacattaaaaaaaactagaatccaaatgaagtccatacattgggagtcactgataaatcttctaagtctttcctaaagttccctccaatctccttttcttttttctttgcaacttatgaagaaactaagttgtttgcctatagctttctcatggtctagattttgctgactgcgtcccaaagaatcattttaacatgctcatctgtcctatatgtatattacataattctgtaaccgaatttggaggcgtgatcagattcaggttcaatttctgggggactgaggaacaaaactagatagatgatgctgtattctagacagtctctatttaagtgatatcagcagctattaatgtttaatgcaatatctgttcattattctttctccgcttgttagccaaaatacttctatgaagataagtttcctttcatccattaatttcatcttcagtggtctagtttgtaaaacaaacggaacaaaaacaaaggcagaagagcaactagttcttgaaataatgagttggttccctagcaatataatcaattaattttcatcctaggtttcattatgacttcacgggtctaaattgaaaaccaatcaactatcttccttttctcttacgatttaaaagttgctcatggaaatttgagaaatacagaaaaagtatataggagcttggcaacatagcaataccctatctctacaaaaaaaaatttaattaactgggcatggtggtgtgtgcctgtagtctcagctactcaggaggctgaggtgaaaggactgcttgagctcaagaggttgaggcttcagtgagccatgacagcaccactgtactctagcctgggtgacagagggtgaccctgactcaaaataaaaaaacaaacaaaggccgggcacggtagctcacgcctgtaatcccagcgctttgagaggccgaggcaggtggatcacctgaggttgcgagttcgagaccagcctgaccaacatggagaaaccccgtctctactaaaaatacaaaattagccgggtgtgatggcacatgctggtagtcccagctcctagggaagatgaggcaggagaatcacttgaacccagggtgggggcggaggttgtggtgagccgagatctccccattgcactccagccctgggcaacaagagtgaatctctcttaaaaaaaaaaaaaataaaaacgaccatcactcatcctgccacttgatgataaccaccatcaatcatatggaaattttccttctaggtcatacttgaattttacaaacttaagatcatattgcacatccaattttatattttacatttattctcttatcaatatatttgccctatgctttaaaatcagcttacttccagccttctcttttgaccaggatggctcatcacttctggcaaagtttgaagaagatccactcggcgggtagctccctcagttcctttgccttgcctcattatgagggctaacgagaagctggcttgaatggacattattcctaactgaataacttctctatgaggttcttcaagctatcaggtttcgtacttaacaagggaggtctgcctaagatgcgtagatcatgagcaatgtccccatcttttcagacttactctaagtcccactctagtacaggtgatctggcttaggcattctgcattctactctatcaccaggaactggttaggaatgttcttgttggtctgaatatggccataattaggacgtgccacacctcaaaggggaagtgaaagcctgggagctcgtaagagtccccagcaagaccaatgagtaatatctttatacatgcaaatacaaacgtgtacacatacacatttacagtaatacattgcttaatgatggagatgcattctgaaaaatgcatttttaggcaattttgtcattatgcaaacatcatagagtgtatttacacaaacctaaatggtatagcctactacacacctagtctatatagtatagccactgttgtaaatgtggtccataatgacgtggaatcatcattatgtggcacatgactgtttatttattaacagatggggtctcgctacattacccaggctggacttgaactcctgggttcaagcgatcctcctgcctcagcctcccaggtagctgggactacagtcatgcaccatcatgctgctattcattatttttattgattgatttataaagtgatgtctaaatttggggccacaacctacctttacaggactaaacctccaggtatgttttgtagtatagattttgaagcattcttaaattgcacctatccccaccacttgcttttgtgtgactttatgcatttacctacatcctttatccctgcaaacagctgagtttttgagttttaaagtcagtttgacatagttggggttcatcaaagctcagtttggggctcttttcttcgcttctcttcattctttccctcggtagtgacacccattcctccgagtttaaattaaagcatattgcatgcattaactcatttactccttacaagaatcctatgagctggatactattatctccatcatttaagaatgaggaactgagagactgagtaacttgtccaaggccacacggtgtggataaaagcccaaatttgaatcaggccatctggcagcagggatcctactcttagccaatctatcctaatacctatgcaatatgtatgaaaacatgatctcacttgtatggtctcttaaactttactggttctgtgagcccccacagtagagctacccatttgtggagacaggactggtgtgatagaacactgacagagtccataagaaagcaagagaactgtttccctgtagtatttcagagacagatgaattaatgttaaatgtcttacccacatcacttgtttcattcacattcactaagaactgtgtacttaaaatagaaaatacctcattacttacctttgatatctctatggacaatcatattactgtgcaaataatggacaccctccagaatctgacgggtgtatttcctagtcacattctcagtaagagcgccatatgcttttaattggtccttaattgaaccctaggagaaaagaaaacaaaaataaaaactactgtatatggtttgaaatgaaaactgctattaaatctttatcagtaaagagggcaggaattctcatctcactcgtctaagcatgtcctacttgaattttacttattttgttcttattctgtttttaaagtattttattgacatctgctgattttctcagaaaaaggaatgggtgtaactagaaagaacacagagattttaaagtttttttctttatatactcaacactcaagttcgaaacatgagaacatacacaaaaggagaatagattttcttaagtgttttttagggcaggataaggtgccatctctgagaaagctgaatcagtctgaagtgaggaataggtatttgaattttgaaaacttccctagtgattccaatgtataagtttgattaataatccctttaaaagacagaaataaaatgcttcctgagggacaaatctcttttttgacaggaaaatacatccaaatgtttctgcttttccttgaattttggtaaacggtgtactctgtcatatgaaagtaaatccttggattttacagatttaaccatttgtcctttccactgtttatgagccatccttggagggagagcattttgcaattctgtggacccaaatttgcaaacacacatatggaaagcggcaagtgtggccagtcaactactcacacctacagttcagcacggcttgtttgttcagtctactgtgtctctacttgtagtattatacagaataggccaggcacagtggctcacacctgtaatcccagcactttgggaggctgagtgaggaaggcagatcacctgaggtcaggagttcaagaccagcctggccaacagggtgaaaccccatctctactaaaaatacaagaattagccaggcatcggctgggcgtggtggctcacgcttgtaataccatcactttgggaggctgaggcgggcagatcacctgaggtcaggagttcgagaccagcctagccaaccccgtctctactaaaaatataaaaaattagctgggcatggtggcaggtgcctgtaacctagctactcaggaggctgaggcaggagaattgatttaattcaggaggtggaagttgcagtgagccgagatcgcaccactgcactccagtctaggcaacaaaacaagactccttctcaaaaaataaaaattgtagccaggagcaatggctcatgcctgcaatcccacgacattgggaggtcgaggcaggcgggatcacctgaggtcaggagtttgagaccagcctggccaacatggtgaaacctcgtctctactaaaaatacaagaattagctgggtgtggtggcatgcacctgtaatcccagctacacgggaggctgaggcaggagaattgcttgaacccaggagacggaggttgcagtgagctgagatcgtgccattgctcagcctgggcaacaagagcgaaactccatctcaaaattaaacaaataaaaattatggaaatgcatgtatttttaaataagtaaacatattaatcaccaccttgaaaatcattaatactagatgtactctatataatgacagatgtcacaaatcacattttataactcctaatgaaattatagactctagtgatgactatcaatcagtgctaaaaacattaggtggatggctgaaaaggaacaggctattcctatgtgccactgctatacctcatattactttctggtgtgcaggaaaaaacaaaactttacaatgcaggactcaatatgtcaatcatcctcatctaatggtagctctttgcattgctacagtggaataaccagaaattggctcctgataggatgcaacataaagtacacagcttcatctatgacgtatcagataaaaaaggctgaatgtgaatctaatttagacctcagatctaacttggagtttatagtaaaaaagggataaagaaacaaattaaaatccgcatgctcatttcggcagcacatatactaaaattagaacgatacagagaagattagcacggcccctgtgcaaggatgacacgcaaatttgtaaagcattccatataactaaaattataaaaaatttaaaacaaaaaaacaaaatccacaagaatgctactagagaaatccatgagaatttttttttttttttttcaaattcttccagatcctgagagtgaagactcttaacaggctatcctcttctctttgtcaaatctatatcatgtacaaattgactgctctagatagtaatcctagcactttgggaggctaaggcagaagaatcacttgggctcaggagtttgaaaccagcctaggtaacagagtgagaccttgtctctacttctttttaagaattataaaaaattgtttaagaagagagagataattaaggggcataacaattaaatgtatgtatagactggaacttggtgtgaatatatcagctataaagggcattttagggcatttaaggaaatctgaagatgggctgctaagatgtctgtaacctacttgagaatacttttatcattaatgagttaaaaaatacaaagacagaggaagaggatagaaaatactactcagctctaatttaaaactcttccaaaatgtccttaactagggttaacattttataatctacgtttttgttgtttttcttttattaactaaaattttaaatagaatgtgtattttcaaaaagatgtactaacttacccctggcatatattccataaatatggaaagtgttttttcctggggatccctcaaacagccataatactgaacaattcgctcatgtagcaagtttttcagcaactgaatttcacactcaagtgcatttacttcctgaaagagagaattcattgttaagtcttcaacaatgtcagtaaaagcaaaaaattctaacttcatggaccatcaaggtgatttcattctgaaaattttagttcccaagtaataaacatctgaaagtctctaaccaataactttttaaacagtccttgatgatatgctaaagcaacactgactcagattaggattataactgaagtactaaaaaagaaaaatccatattaaaaaatagacaaacatatctaatctgttttacaaataatttatactaaagaaaactgcttttttttttttttgaaaaaaaatgcttcttatttagaatggaaggggcttaatgttaaaaaataataatgaataaagtttcttataatgtgacaaagtaatttgtgcagtgatttttaccttgctggtctcaggactatcggggtcaaattgaacttgcttaacagccaattctcttcctgtatcaacatcataacagaggtagacccttccaaaggctccttggccaagcagtttgcccaatctccagttggtcggagctcgaggtgctgaaaaagaacactttcttaaagtgaaatatcaaacagcacacaaataaatggttaataactaaatgagcatactgcattagtgacatccttcattgaatgtacttggatataaggaaaaattatgattatccaaattcacagttaccgtctttcaaatttttctctttcgtcaattttctacaaatcctaaatcaaaaagagattcatatcccaagactcatttttttctgaaattgttttcctaattacacatgtgacagcatctttctttcactcaatctaacattccaaagactgtaagatgcaccatttctattcttcactgcagtaatatttgtacttagtttttcagcctccacctacaatgtagaaagctggaaagagtatcattcccatccaaacaacaagagaaatctgggtaatctacaaaatttaacttttgttgaacacatatcaaaaaactaagattgcagggcaaccaactaacctgaaatctaaggaaaaagtggtacctccaaggagagacagaacagaagcactggctcacttgtggcaaagcacagacaaagacccacacaagcaaggaagaattcacctccattttaaacaaatgtgggctggcatgagagtattgaacccttgggagatctagacacaggtgagctcacacctgctctaagtcttttctgtggacctctaccatgcactcataggagcaggagacaccagggaaagcctcccttggtggtcaaggcctggaaaaggggaatggcccactgttgtgggaaacgcagaaagtccttccaaacccttttcccctaagaaacgagagccttcagccgctggagaaagcagcaaaccctgtcacccctgcattacagttaaagacccactgaggctaggggaatgcaaaagaaaaaaaaaaaaaaaaaaaccctacccctgagagagaggctgaggctggaaaccttctgtgaccctgatcattagagcactcctactcccggaaggtgggcaagcccatctctgagaactgaggagataaagcctgcctaagactgaagctggataggacaacacagaaccctctagtctgcctcccctctcctaggctggcaagtaacagcaatccacttactgagagcatgacaaggccatggagagatcctccctctctgagaagtaggcacaaaagaaaggccaaggctgggcgcagtggctcacctgtaatcccagcactttgggaggccgaggcggacagatcacctgaggtcaggagttcaagaccagcctggccaatgtggtgaaaccccatctctactaaaaatacaaaaaaaaaaaaaaaaaaaaaaaaaaaagaaaaagaaaaatagccaggtgtggtggcagatgcccgcaatcccagctactcgggaggctgatgcgggagaatcgcttgaacccgggaaggggaggttgcggtgagctgagatcgcgccactgcactccaacctgggcaacaagagtgaaactccatctcaaattaaaaaaaaaaaaaaaagctgatggagcaggaccattgagaaaatccctttaggaaaccagcacaaggtaattagaagaatttaaagtcagtggtgcacagagaccatgacaacaacaaaatccaaacccagctcaactcctaactagactgattgacttagctcctcacagtaacggcctagcagaagaagagctgtgcctatttccaggcatacattctatttacctcctcccttatcctatacatgatatctggcattcaatgtaaaatgataagacacaaaaaagcaacccttccaaaaaaaatcaaaagagaaagcaattaatacaaccagactcaggaggttcagaagggaaatttaaaataactatgactaacatgttaaaggttctaatggaaaaggtagacaacatgcatgaacagatggtgaacagagcgatggaaactacaggaatgagtcacatgaaaatgcatgaaatgaaaaacaatgacagaagttaagaattccttcaacaggatcataaatagatgcaacaaggctgaggaaagaatcagtgaacctgaaaatagatcaatggtgggggagagagggagacagggagaaagggagagggagggagagagagagacaacagaggtatgagacagtatcaaatagtctagtgtataggtaataggaatcccaaaagaaaaaggaagaatgagacagaaaaaatacttggagaggtaacaactgagaacttttcacagacaaactataaatataataaactgaaagaacaccagctgggaaccctacacaaatatacctagacacgtcatattcacactgtagaaaatcaaagacaaaatcttgaaagcagctggggcagctgtgggggaagaaagcatattacatatggaggaacaaagataagaattatagcagatttctcttcaggaagtatataagccagaagacaatgggacaatagctttaaagtgctagaaaggccaggtgcagtggctcacacctgtaatcccagcactttgggaggttgaggcaggtgaatcagcttaagcccaagagttcaagaccagcctgggcaacacagcaaaacccactctctacaaaaaatacaaaaattatctgggcatggtggtgcatgcctgtagtgccagatacttgggagtttgaagtgggaggattgcttgagcccagaaggcagaggttgcaatgagttgagattgcaccacagcctgagtgacagagtgagatcctgtttcaaaaatgaaggagaaatagacttttttcaaacaaacaaaagcagaatgaactcagtaccagcatgcctatattacaagaaaggttaaaatgcagtttttcaggcagaaggaatttgatacccaatagatcttggatctgtctttgtttatacagattttggatatatacaaagatctataaaaatgaatagactgaagatatatataaaagacatttttctcttatttttaatcacttcaaaagatagctgtctaaagcaaaaataacagcaatatagcatggggtcaatatggatataaaagtaaactatgacacactagcacacaaaaaggaattcagagtatgcaaatagtgctgcaataaacatctttgaacatgaatctttgtatgcactgcttacacagtaaggtctgaatgctttgcaatccagcctgagttaccactgtaggcctattcccactatttcaagtaagatactcccacatcagccaaaaattgaactattccccatttttagatgatgttatggcctcttgcacattatctcctcagctggtgatttctactcacatttaaatgctatacaataattatttctccatgtatcatctatcccattagattatgtcttggagattatgtttgaaatctcagtggtaggcattcaacaaggatatgtggaatgcatggataaagaatgactagttggtaataattttcctaatacaagtgaagaacagaattatctaaagtaattagcagtgataccatgcttatacctgacattccaaccacctttagaaacaccattattaccttttttgagtagttcatctgaccccaaaaactcacttagtatttattccttttaataatataaaattctgcaaagattctgctctacatttcactataccaagttctattacttacaacggctgggtgggctgatgtccattacggtcaaagtaggattgtctatgtcacttccccttcttcttattcgactatcatcatactctggggtaaagatactgcttccactactagtgcttaaggaatgatcagtaggactgaaactcacaggagaccgtaagctggtcccctgggtccttctagctcttggaaaagttttacgacctaaaaaatgaaaagagaatgaccttataccttttattaatatgttatacttttaaagtatttaaaatttgtaatgtagagaatagaaatttgtcctgtgactaggctaagaaactcaaataggaatgattgggtgggaaaaaataaacaggatctgaatacaaattcaaataatctcttatgataaaacatgtatgagtgtgcacacagaaacatacacacacacatcttaaaaaggaacctcctcacttctggataaaaaggaggaaaaaaatttactctcatttccaataatgattttaaaatctaaaacaaagatgcagaagttcacaggtagtaatttttttcttttctttttgagatggagtttcactcttgttgcccaggctggagtgcagtggtacaatctcggctcactgcaacctccgcctccagggttcaagcgattctcctgtctcagcctcccaagtagctgggattacaggcgcccaccaccatgcccagctaattttttgtatttttagtagagacggggtttcatcacgttggccaggctggtctcatactcctgacctcaggtgatccacccgcctcggcctcccaaagtgctgggattacaggcatgagccaccgcacctggccagtaattttttttcttaaagggatgatgtaagtatcaatctcatcatcaaagagtaattttctaatatcatttaaaagttactccttttggatgggtgcagtggctcatgcctgtaatcccagcactttgggaggccaaggcaggcagatcacttgagcccaggagttcgagaccagcctgggcaacatggcaaaaccccatctctactaaaaatacaaaaattaggccgggcacggtggctcacgcctgtaatcctagcactttgggaggccaaggcaagtggatcactggagatcaggagttttgagaccagcctggccaacatggcaaaaccccatctctactaaaaatacaaaaattagccaggtgagaatcgcttgaacccaggaggtggagggtgcagtgagcagagatcatgccactgcactccagcctgggtgacagaacagagtgagactctgtctcaggggaaaaaaaaaaaagaaagaaagaaaattactccttcttggccaagtgcagtggctcacacctgtaatcccagcactttgggaggctgaggcaggaggaccgcttgagcccaagacttcaagaccagcctgggcaacatggtgggacactgtctctacaaaaaaaattttttaattagctgggtgtgatggcaaatgcctgtaatggcacacacctgaactcaggaagccaaggcaggaagatcacttgagcccaggaatttaaagttacagtgagctaagatcatgccacagcactcccgcctgggcaacaaaaccttgtctcttaaaacaaaaaattattcattttcttttaagggataaccaagtcttataagttgtcataaagccaaaatgcccattatacttttgttataacacaattcctcatatttttctaatggtattaacacaaatatgaggttttaaaaaatttttgtatttatttttgttgttgagattttttaactattcttgtggtctaattgctagaaacttaccatcattatactcttgatgatgatatgaaacatgataccttcttggatatgttcctccttttccaaatttctcaaagatagggttatcatagtctgttaagacatataagatggttatcttttatttaaaaaaaaaagttaaatatttctaatgatgaaaagcacatttataaatctttatttgacttttcaaaaatcccccctctccctcccagccaaaacattatccaatgacataaacatttaaacatttagaatttataaagtctaacctgaaaattcctgatgattatctgggtagctctgagccctaggcattcgtgattttggatagctctctctataaagaaaaaacatcacattaagtttacagaaagaacgtaagacattaaaaagaaaatctttgagcaatatctatatctatctgtgcctctctgtatgtgtttgtgtaaaggagctcactttgaaaggttagcatacctaaaaaagaaaaactacacttacttggtacatgtaggcaaagagcatgacttaaaattaaccttacagtacagtggaagaatgacgtattttggaatcattaggtgtttctaagcactgtgtttcaatccaagctctgccacttaactatgtaaccttggcaaatcacccttctgcatcaacaaaaaagataatttccaactattcaagtgtacataagtaaggtatccaggatagtgttttgcaaatggtaagtactcaaatatatagctttctcgttactacttccctgaatttcttaaatgtctaccttaagatagacattgacacagacagaaatttcatatacatggataaaagaaacttaaatgtgcattcccacgcaatattagttatttttttcagaatttgctttcataaagcaattccagagaggattaccaagaatactgtcctattgagaccaggagggggagcacgtgtaacaaaaaattcacattttgcaactttatcctgctcatattcctgaacagctttttcacaaaagtacttaaatttttgcctacatgtaccaatgtgacacagtgggctacaatttccaagaatttaaattatttctaatctggtgccagaatgaacataatcctgaacaggtgaaataactcaggaaatttccaaaaccaaacatattaatgtaaaagttgatagcacttttcataaacacagttttaaaagtaaatgtacataaattctaaatttgatttgccttcaaacacacaattttgacaagcaggaatactcaaactattataatcagatttccttttaactaacaaagatactgagtcccatgaggtaaagggatttatccacactgtgcaaaaattcatctgccgtcatcatacacaagtaccaattctattcctctgaatgtagcacaaaaaagttactgataattcaacattctatctgtatgaatatttactcatatctattaaaaaagaaaactacagtaagctgagcatggtggctcatgtgtgtaatcccagcgctttaggagaccaaggcaggaggttcgcttgagcccaggagttcaagatcagcctgggtaacaaagtgagacccccatctctacaaataatacaaacaaaatagccagatgtggtattaatagcaaatgcctttggtcctagttcctcgggggtcagaggtgggaggactgatggagccaaggaggtcaaggctgcagtaagccgcattcacgccactgcgctccagcctgggtgacagcaaaactctgtctcaaataaacaaataaaccctccaaaaactacgataaacattacccatccaaaggactatcaagtgatggacaacttcctgagccagaattttcagggctgcttaaagataatggatccagcatctaggaaaaaaaggagttccaccatgattcaatttgatataaccaaaagttgcttattaaaaaaacctgccttaattagacatacttcatgtaacataaaattcacccatttaaagtatacaagtcaaggcttttagaatactgagagttgtgcaaccctcactcacaattttagaacaattccatactcaatagtggtcactctccagagttactcattttcaaatgtcccttgtaagcaagccacgacttcaaaatttcctaagagaaaaatattctttctctatagactattgactaaataattaaaagctacaatatttcacactattttgcttactgaaaactgaacaatggccccacccaaactgagactaatgacactatgactattacattattagaaaatgtaaactactataatagtgtgaacatataatgcgatgcaatgcaatgttaagggaataacagcaactccatgaaaacattttaatactataaaattgaagtattttttaaatgtttcagaaagttcacaaacctcagtttcacaaaggtaaatatttgtagtttcattctatctttcaaatgtttaaaaaaaaaatctggctgttaaattacaaagcaaatgcattatcattcactcactctcattcattcacttattgagcaatataaaaccagctgtattccagctttctttatacaggcacatgtaaattaatgggcattttcctatattttttctattttgttcagttaagaagatatgtaattagagaagagataatacacacacacacccagttacgtgccaaatcacactgaccctgacaacatctctttaaattaaatttaaaaaatcaaacttttgcttacttggtccatgctctctggaatgaactctccttcactgttgatactagtgaatgacccattccgggcaacctggtgtaattcatctggaatgtaacctgggggaggagaacttctatctctactagtaggacctcaaggaagaaaaataatgtaatttataattataggcaagggaatcaagttttgttttaaataggctatatttctgaattatatcattaataatttcagcaaaagaaaattcaatttttattaaaacttatcagaacattcatttgtaaatcttcaaatggctttataacctttgtaaattcccaccctatcataattattaacctcaccataatattcatttatactcactaggtaggatggtattctgactgctgataggatgataatacaatatagatttctggcattaagacagtttatttaagtaatcacatttcttatgagacaataacccactctattttacttggttctgtggaaatgatgctatatttattagtacagtgtctcacctttcctcatagttttttgaaattaaactatgtgagcatttaagttctggtccaatttaaagcaaaaaacattttagccttatgtaaaggagtcattgtgagtatatgcaagcatttgttagtgagacagggaggaaaaagaaagcaaaattattaccaagacatgtgcataaaagagagtactgtctacacttgtctgtaaaatgattaggagctcaatttgagtcaggattgatttaggcttcataacaactgtagccacaataatactggtccctaatatttttattccttccatatacccgtgcttacaaaagatcaatatagtcaattactaaaaggagataggaccaaaaaaaaaaaaaagctatgaaaattttgtctccttatttgacaaccctttttcacagtaatgcgtatgccaacgcactcttggttgagacctgtttatcagcatacactcctaacctaaaggagtttttcctccatctcccttttataaaaacaattaaaaagaataactgccaacatataagaaaaatagataatggtcatatctagcaaagccattccaagtttaaagcagtgccaataaaagaccactaattctatactttatgatttccaatttcttcttatgctggcactgacgtcaaacaagaatatttattagaataagactgaggtattcagtgtaattttaattcaaaatatatttaaaatgtcaatttaactagtacatttagcttgttttgtctaatgcaactaaagtgaattagagctgggcactgtggctcacgcctgtaatcccagcactctgggaggccaaggtgggtggatcacatgaggtcaggagttcgagaccaatctggctaacaggctgaaaccccatctctactaaaaatataaaaattagccaggcatggtggcgggcgcctgtaatctcagttattcaggaggctgaggcaggagaatcacttgaacccaggaggcagcggttacagttagctgagaccgcgccactgtactccagcctgggtgacggagtgagactctgtctcaaaaaataaataaaataaagtgaattagcaattttttaaaaaatgacaagtaccgtaatgtgataagaaatggggataaagaaagaaatgtacaatgaacatctgagctttgtacaatgtacaaaatgtataaatgtacaataagctttctagtttgaaaagtaaaatgtacaagtgttctctcaatttaatgctacaacaatcccatgatttaaagatgaagacacatttactggtctcaggttcatcagagagctggaatttgaatttgggtgtttcaaatgttctttcaccaaattttaaaactatatcgaaatatatctgaatgcaaaagacaagccatttgtattttgcttgtgtatcacctctgctgctcgcatttctgcattcctgaaacccaaagtaggacttatttaagacagacacttcgaagagaatggtcataaaatagcttcttctggggaccaaaagagaacatgaataatgtctatttttttgatggtccacatgccaattcaattttttctttgattatcaacaatcctcttctgttaccaatcttttttagattcccaaccacatttgtttttcctcctctttaacttttctcttttaaatccgcccctcatacatgttttcatgccatctttaatggccatactcactgccctctctcaaagaacatttataccagcggttttttgaaacaatgttaatgcttttatcaaataaaaatgtagattatcaatgttttatacaaattgaagaacagacagaatggggagttgagagtacctgtgtcaaactcatgttgcacgaataaagcctccttaaactacagcatgcaagatctttatttctttatatcataatcttaattataacaataaattaatggcaaatgaaaatgaatactaataaagtaataataaagcataatataaaaattcttagtatctttattttgagagcattcttggcaatcactaaaaccctagagaaaggcttgtgaatttacactctattaattttaatacattataattacttcttttaatttttttcctccattctatttgtacaattaaaacctttttttttgagatggagtcttgctttgtcgccaggctggagtgcagtggcacaatctcggctcactgcaacctccgcctcccgggttcaagcaatcctcttgcctcagcctcctgagtagctgggactacaggcatgcaccaccacgcccagctaatttttgtaattttagtagagatggggtttcaccatgttggctaggatggtctcgatctcttgaccttgtgatctgcccgccttggcctcccaaagtgctgggattacaggcatgagctaccgcgcccagcctaaaacctctttaaagttttatttgaatttgttaacattaaaataccctgagtatataaataaagaatttaaattggagattactaatcctgtaaacttgaatttccaagggacgtcaaatattagagtgtatttaaattaaattataggaagtagagaaataaaatattatttatcaggaatatgtttaggtgccacactacattaaaggatggagaagaaattgagaaatcattcatttcataattcagacactagtttcttacctattatagatagccgttttttcctctctgctccaaatactgtattatccaaatcttctagtgatggcaatggttctaaattagtagcctacaaaggagaaaagacagttaatgctattcttcctccttggggctttaaacagaatcctctcccctaccaagtacaaaacattttatattgtttgtgagccttaatcaaatcctctactctttgaaattttaattctaacataattctaagttgtcagtttctattagcttcgtatgtacaacatattatacttatttataactatgactgtggtttttgaggagtaaggatattaaagtatagtaattaaaggatgtaagtttacatttaatcataatgaaaatattgcaatgattatagaatataattatgtttcatatgttaacttttacaagcctaagtcctataattcttactgaaaaaaatatcccaaatcatacctgtgtacttccatttattacaagtaatatcttgaggctcttcatatgaatactacgatccagcagttccacagctttgtccaagtcatcttgagtagttaatggaattaccaactaaaaacaaacataaggaaccatgcagctatctcaccaggtcaagttcttccatgagcatctccactactaaggaattacaaatgtcaaaataccttgctctttgatttgttactatgatgaaagtctgaatgtgtatgtgtatattgttttgccctcctcattctaccgccactaaaatcttagaatgaacatgtatgtttttaaatttttctttattaatcattacattcttctagaaaataacatttaaagattaattttctaggatatttccataatattgctaaatttaagttatagtatgttcgcccctaaaaagaatgaagaagtacagacaaagaccatatgaaataaaggtactacttttcttctgtatagatgaaactcagttcttttttcaatagtaaccacaaatttgcactctcagctggtgtgctcttcaacataccaacatcctgagcacctgccatggaggacagctgccatggaggggtaccactagtaacatatctgcaatctacagcccacctagagttcttctctctgagcctagtgacctgaccactataccctaaaacaaataagctaatgagttaactattccatagtaaaccctgcatgtggaatctgctttcactagtcttctcatgcagcagatgttatagaggacaaaagcacctaagaggtctatgagaaaaagtgtaattcatacaatttaagaaataaaaatatgtcctttttttaaaaaaaaagtcaatttagtaacttaagaagactctgtcaataacttcaaagtatattccatttcattgaaggaggaacagaataaaaacaagtgaacatattctgcactagttaacctgctctactcagcacaatatatgagccattaaaatgcaaggctgaattaatttggggtctctacagtataaattctttgaagacaaggaccccctacaccagcaatgagcaaagagcagacaacctggtaaatgctgtctaataaatctcacagtgttaaaagctcaatctgaacccaaacccactagctggcatggtgtatgttcattctgcagacttctttgtgaaaaaagtccttggggtttttgattttttgttttgaaatggagtctcactgtcattcaggctggagtacagtggcaatctcagctcactgcaatctgcctcctggtttcaagtgattctcctgcctcagcctccccagtagctgggtttacaggcatgcaccaccacgcgtggctaatttttgtatttttagcagagacagggtttcaacatgttgaccaggctggtctcaaactcctgacctcaaattatctgcccgcctgggccttccaaagtgctgggattacaggcgtgagccaccatgcccagccaaaaaagtccttgttataagaaaggctgccaaacacgaatataaagaaggatttatgtgaattccatcagacaatctgcttgcatttacttactctgttgttaaaatatattcccaatttctgtttgtagctaattttgtattactgtaagggaccgactaactgggctcttttcgctctatgagaatttttttctaataaaatacaattattaactgtttggtatcatagaacaagcctgatctactgatctacttaaacacatttctatttcccaccaattatgaaacatattggtatatcttgcttctatcttcaatagtctattacttttcaagcactggaaaacattttaaagcaatggtaatgactgttccgccgatttttcatttgaggggaaaatctgaatacttacttttattattcatttataactggattgtttacttctccaagatactgctacttttgggggaaaacaacactaagtcaaatgacagaaaaaaatatgaacataaatgattctgctgctcttcagtttgctgctgtaaaatgtgaacatcctggaggggtgcctggtgcagcagcttaggcacttgcctacagacctaatgtgatcctgcctgtgttctaaggttacctattacaaaccgtaaaatgaggactaagagtcatgaacaagtcccaggttatctacattacactaaataaatcagataatgttttctggcttggtgaattcatttcagtctcattcatgaaatctatcaccctctggcttatttttgataaatcagttgtttgttgatataaatgctttctagaaaggaaacttaaaattgagttcgagaaccattaaacagaactgaaatctgaaagaactgaattatcttcctgaatttacatagtgaagtatgaagacagccattaaaaggttctccaggctggacgcagtggctcacacctgtaatctcagcactttgggaggctgaggtatgcgggtcgcttgagccctggagtttgagaccagcctgggcaacatggtgaaaccacatctctagaaaaaatacaaaaattaacaaggtatggtagtgcatgcctgtagtcccagctacttagaaggctgagtggggagaggattgattgagccagggaggtcaaggctccagtaagccatgactgtgcctctgtactacagcctgggtgacagcgggagatgctgtctcaaaaaaaaaaaaaaaaaattcctgctctactcatctaaaatggaagtgatcttagaaaatccttacttggcttgaacacctccacatccaacccccatgacacacacacacatgcaccctgaacacctccacaaccaaccctcataacacacacacacacacacacacacacaccccttattaaagagaagccaaactaacaaatccaaacaacctcagcttatatttccagcttaaatttccttaacgtttcaattctagccaactagaagtttatagagtaacagttcattttgaacagaggaattaatattacactagaaaaatatttatagaagtggaataacatgcagtataaatgaattttttgcctgaccacatgtccacaaaactagtaagactttctttagtacccccagtgtccaagatcatgcatttggtttgggacaatatgtcaagatatgaaacaggatacggttcactcacagaatctcagggttgcaagaaatcttaaatgtaatcttatcctaatgccacccctaccacattcctgccaagaggccaccaaaatataatggtagaaccactcacagaaatccttcagaaagcatgagaaaaataaactaaaatggagcagttttccaatttttagaaaatgggaaaaggttcttaaaaatacagatcaggccaggcgcggtggctcatacctgtaatcccagcactttgggaggccaaggcaggtggatcatctgagctcaggagtttgagaccagtctgggcaacatggtgaaaccccgcctctaccaaaaatacaaaaattatccgggagcagtggtgcctgcctgtggtcccagctactcaggaggctgacgtgggaagatcgcttgagtcctgggaggcaaaggttgcagtgaggtgagatcgggccactgcattccaacctgggtgacagagtgaaacctcgtctcacacaaaaaacaaaaacaaaaaccagttagcttgatgtcaatcctcaagaaaaccccagaaaaaaattacatagcaaactgggagaagtcactaaaaaaaaaaccagcaattcttaggaggtgacataggtataatatggacaaatcatgtcatgctaacctcatttttcttgatagacctactaggctgtagataaagacaatattgtagtcttaatgtatcttggcatttgaaagttttccataatacaattttagaaaaaagaaaaaaagatatgtctaggctcccctataatcatcctatgagataataattcaagttcaagacattttttaaaaatttattcttttttgttcagacagctctgtcacacaggctggagtgcagtggttcaactgtagctcactgtaccctcaaattcctgggctcaagctatcctcccaccttaaatccccctgcctcagcctcccgaatagctgggactacaggtgtatgccatcacactcagataattttacttttttgtagagatggagtctggctatgttgcctaggctagtcttgaactcccggcctcaggtgatcctcctgccttggcctcccccgatgtgctgggattataggcatgagccactgtgctctgcccgttattcttcaacacaatactttatgcatttttttttttttttgagacggagtctcgctctgtcaccaggctggagtgtagtgacgcggtatcagctcattgcaacctctgcctcccgggttcaagcgattctcctacctcagcctcccaggtagctggaactacaggtgcacgtcaccacgctcagctaatttttgtatttttagtagagatggggttttaccacttggccagaatggtcttgttctcttgaccttgtgatctgcccacctctgcctcccaaagtactgggattacaagcgtgagcaaccatgtctggcctactttatgcatttctttcaaagaacttcgtatattcaaacaactcatttattaatggtttgcttgtaccacaagtctataaggtctatactccatgaggtgctgcaacttataacttatagcattatgcctgaaaaattaataaatactttctgaatataaaaaacaaattcacctaattactaacccaattattaactaaattgtcctataaattttaagatcacaagatcctgatatctcatagaatctcaagaactaaaagaaacttcagagatcactgaatccaatcctaagtttacagaacattaaaaaggggtttctccacaacgcagagctcctcactgctagagcaagcccttcagatcatacatactgattcccaaacataataagctaattgagccctaaccaacactaaaataatcctttaactcaattgtttaactaccaaagctctgtcatctgtagccaagtgtagagtatgagaggaaaagacagttcaccaataaagtacacagaataaaaacaaaaccataaataagcagcaaaattccaagtaatacatatattttcccctataatacaccctcattcaattatttgcatagtagcaccctctattattttccacaatgaaataaatccattttagtcagttaaaatttacttgttttatccttctgacataccatatatttatcaatccctaaataaaaacacgagtcttaaaagcagtctcttaaacgaacacattacttttgaaggtaagatctactaaagttaaactgtacatgtttacctcgttattggtataatgtagatccatagactgtccaaaggcaattttagctttagatctcagatcttccagtttaactggtctggggaactgaaggattctatataaacacaattttaagattttattttcttaggcaaagttaaataataaacttgcaaaagttacctccttttagagtgatacaagattaactaaaaattacgtaaatattcactttacttaacactacaacagcacattttttaacacaggcacacattttcaacacaaagttcaaaaactctgaagtctgttttatcctaatacaaattttaaaaaggaaattctcaaaattttctgcagtttttaatttgcactgaaactaccatatgaatgttaaagagcaatgcaaaatgtttattcaggaaactgattaaacttaactatgtgacatctgtatgacagaatgaaatgaaactgttaaaaagaataaagttgttctccagggattcaaattttgatttctgtatccttatcaactcaacatttttgggtacatatatcatgtaggcatacttccaaaataaatatttttacaagattaaaattctagtgttttctttctacttcccaaagactggcctgtgctgcccctagagagcatgcacctaaagcttgaagaccaccaataccacactataagccccataaggaaaaagactgtgtctgctttgctccctttattccttcagggcctagcatatactaagtactcaacaaataatgctgaatgaatgaaaaaattgggaaaatatccaaaaaagaatcttaaataggaaaatagattggatagttccatggtttatctgatatattccagttttaaatatttctatgtagaatatgcttatatgatttgtgagccactttaaaatccttaaaactgttaggcttttcactacattaatttcatgagacactaatagcagaaatgaaattctatcatcaggctgggagcgtgggtcacgcctgtaatcccagcactttgggaggccggggcgggtggatcatctgaggtcaggagttcgagaccagcctggccaacatggtgaaaccctatctcgactaaaaaatacgaaaattagccaggcatggtggctgttgcctgcaatcccagctactcaggaggctgaggcaggagaattgcttgaacccgggaggtggaggttgcagtgagccaaaatcacgccattgcactccagcctgggcgacagagtaagactccatctcaaaaaaaaaaaattctatcggccttaattcctattaggtcttgttagcaattttgttgtcaactaccaccctatcatttgtgcactgagatacagataccaagtagaagactaggtttacatctctgctaaataatttgcagccactagtccaattcactttcctcaacattactaatgacgtaaatgtcataaaactgaggtctcttgagaataatcagaattgtaaatgttaagctcacatatataaatgctatatagtatctggagggatgaaacaattataaggaaaaatatatttaatttcccccaagtaaaaatgaaaggaagtgaaaatatgtaaaggctgtattaaacagtgatcttatttatctctgaaaattgcaaagacattaatcatttctaatatttaacctgaattttgacatattttatctatcttaagtctaagcacattacacattcccaaggactactctattctcaatttgtaaaccatgaaacttcattcaaatctgaaaagaacctttcaaaagcttaattagaatacacatttgattaaatcaattaattaacatgtaatgtttccttccttaccttttttctcctctatgttcaaatttgactcggacatcattctgtaatgaaatgacaaatcagtctttcagagattagacagatcattcagagattagataaaatttctacaatttctaaatgattttgttttttagccattcatttaaaatagaccagacgaggagggaattttgaagttctgtaccagctccaaacaattgatagtgtctgctaaaaagttgagaattatgttgctgaatctgggctcaacaggaaagaacaccaagatctattagtgaaggtaccaggagtatgagacatttgctgatcctgttatgggaaatacagaatattatatttttatgtgtcatgctgagtatccaaaactaatttcatttatcagaatcaaaaacatcctcatttctaaaaatccagagtagactatttgaagaacaaaacaaaacacaatttgcttaagtgcttgaaaaatggatgaaatgtcagctttggagaacagttaccacattaaatgaaatgctaccttattttttctgggaaggggtcaacgttggctgcagaatgctacaattctttatgaacacaaacttaaaaaaaatttttttaacttttaagttcaggggtacatgagcagttttcttatacaggtaaactcacgtcacggggagttgcttgtagattatttagtcactcaggtatcaggcctagtacccattagttatttttcctgatcctctccctcctcctgccctccaccctctcgcaggccccagtgtctattgctcccctctatgtctccatgtgttctcattatttaccctccacttataactgagaacatgtggtatttggttttctgttcctgcattagtttgctaaggataatggtctccagttccatccatgttcctgaaaggacatgattttgttatttattatggctgcacagaattccatggtgtatatgtaccacattttctttatccagtctaccactgatggacactgaagttgattccacgtctttgctactgttaatagatgaacacacactcttacacgaaaatgtgtaacaaacactaacaaaattcttgattcgaaagtgtaaaagctgaacacattaaacaagtcctccataagattaggatattaaaggaaagtaattcataaaaaaatacttattaaaataaatacctgtttttttggtgatgaagattttgcttttctggtttcctgcaaggataatgctggtcgactggccttatgaaggacagccaaatcttgcatgattgagttcaaagcttgctgatcatctaggtagttttgaaacaacacatacatagaattgtaattgtgacatatatatcaacatgtatagacatcaaacacaaaatttaaaataaaatttgatgtagagaatgtattaatgcaaaaatgcatctagaacatttttaatgcctacacttttggtaaaataaaattgcactagacttaatctctagcatcagtccacacatgagacactaatggacaagatgaagtcattctgattcttccaatgatttaatatcctagaataaggtcaaaactgccctgttataacaaattcttttctatgactcctaaacaaaacatcaaggtatctaaaatgttttaaaaagtagggaaaaaaaaataaacaactttgtataaatctcattacttagcatttatattcaaagtacagacttaattttggaaggtttttttattctttcatcaatacttaagagtcagaaacaaagaaaagcttcacctgtggatactggcctactgtatttggaaatgctctttcaaacttcttcaccataaggtttgacaagactaaaaacagactatttaaagatcttggccagcaacaatgtaagaaaattcctttccttagaaaaagtaccaagtccataaaactgagagaaagcatcatgaacatgaacttttagactcttataaatataccaaagatttccttctgagactaaaaccatgtgcctgccagtaatgccaattataagctctccagaagacatcagggacaacttaatttattttcactagtaaatcaattctactaatgataatcacaaatgataaataaaggaatcaagagactttacactttacattttaaaatgtaaccattttggtgagcagtaacttatgttcttggagtagtaaaaattaaaacatgccatatcctgtatgggaaatcactaaaaatattccaacaattcagtagccctaatagtctctcaaacacacaaacagctgacttctctaatttactaatttttaataacacttaatatagtctattttgtagtgaaattatttgcatattaaaatttaaaagtaatggttgccatggttttattggtttattaatttattaatatttccaggttaagaaaaaattttataatccttcaccaaggattttttataaaataaagttttatcataatgttagtttagccaaataggtaaccaagccacagtcaggtacaatataatcacaatagatgtacccatcaataagctcacaatgatctcaactggaataaaagcatttgatgtgaccttctttaagaaggtaaatccttggccaggcacaatggctcaagcctgtaatcccaacactttgggaggccgaggggggcagatcataaggtcaggaattcaagacaagtctggccgatatggtgaaaccccgtctccactaaaaatacaaaaattagccaggcatggtggcaggtgcctgtagtcccagctacttgggaggctaaggcaggagaatctcttgaacccaggaggcagaggttgcagcgagctgagattgcaccactgcactccagcctgagcaacagagcatgaatctgtttcccaaaaggaaaaaaaaaaaaaaggtaaatccttaattctatactagggatagatgaactctaattctttttttatttttttgtagagatgggggtctcaccatgttgcccaggctggtcttgaactcctgggctcaagcgatcctcccaccttggcctcccaaagtgggaacttaaatctatctatgttgttctaatttttattagaagaaacctaaacatttgaatttaaacaattttatatgcttaatattacaatgtcaaaataaatgccttgggggagggcctttggctaaaattatcacatttataaatacttctttctttttgggggggacgggggaagcaaggggagatggattctcgctctattgcccaggatggagtgcagtggcgccatctcggctcactgcaagctccacttcccgggttcacaccattctcctgcctcagcctcccgagtagctgggactacaggcaccccccaccacgcctggctaattttttgtatttttagtagagatggggtttcaccgagttagccaggttggtctcgatctcccggcctcgtgatccgcctgcctcgacctcccaaagtgctgggattacaggtgtgagccactgcacccggcctacttatttattaagaaaaatgagaacggaaaaaaaaataagtaccgttttctgttatatatgtaaaaaatggtggggccagttgaacaaaacttcccatattaggaaggtgacataaaaaacaaagggcaatttaattgagttccttacttggcgggcttgaagaattactactgggcacttatttacccataagtacacttacgtacttatgggtaagtacaatgggtttttttttgttgttttttttttttttttttttgagacagagtcttgctctgtcgcccaggctggagtgcagtggcgtgatctcggctcactacaagatccgcctcctgggttcacgccattctcctggctcagcctcctgagtagctgggactacaggcgcacgccaccatgcctggctaattttttgtatttttagtagagatggggtttcactgtgttagccaggatggtctcaatctcctgacctcgtgatccacccgactcggcctcccaaagtgctgggattacaggcatgagccaccacgcccggcccaatgggtttctgacacatgttggaaggacactgaattgagcacaaaaccaaaaaatacttggaaaataattttttcaaaaatcttttatcagaaatgttgaattaaataccttatatgcttattcatgatatttgaaaaataattacagaagaacatcctcaatcaaaaattcaaacatctgtcatggtgttctgtgactaactttgtatgtttttaagcaatgaatgttgccctactatagagcagtattatttgaggctgacaaaaataaatttgatcgatacatagagtacaagtgacagcacccaaaataaaaagttgaaagaagttcagtaaaagtacatccaatttggagctgaaagtaaggctgactagagtggagaatttgggctacaagggggcactgctactcatgactacagaagaggaagtggaagaacaatttttaaagtagggaggtgaagtctaagcttacatacttgctacaatgacacacagtgaaagtgtcctagcccccactttcatcacatgggcaaatataagttcttcatgagggtgtgtgtgtgtgtgtgtgtgtgtgtgtgtgtgtatttgttttgttaagcaagaagtagaaaatgtgtgataaaggcaaactctggcaagcaaatgtcagaattaaatcccaggatcagtctaagtttcaaaatttagcatccaactactcagtaccatttttcttgatttaggatagggtgggccattcgtgactccatttccttctagtgtcttcctgtctaactaattccctgcctcatgctggaacccttaacacaaaggagaaaaggaaaaaacaaaaaggaggtaaacaggaaaacaaaatatgtaaactgaacatacacaatccattcccatactttagtgtctttaaactaacattataccacaatatacgaccaagagttgtataacatattctccctgagcaccaatgatttgctgctctatgaatgataaaattaaattttatgatttctctcttgccatcagactttaagcaaatcacaacacatcttaacagcttattttgaatgtccctgctgttacgcataaaatgatcattctaaaactacagcaacacaaaaagtactttaattcaaagtctattaagtaaatataaaacatttcataaatctgctatatcataaaatttatttataaaaaggtttataataacacataatagagaaagttttttcacttccattctatcctttaattattgctgaaaaatgcttttagtttgaactcacccattatggcaaacagctcaacaatttgaaaattaggaaaatggttctcccatcagcattctttatggcctgagaagataaaacagatcagcatattaataaaaagaaacagaaaaggagccaggaaaagaaaaaaaaaagtcagtttaaataatactaatgaaaaatatacaatatgaatactttacacatttcgctagggggaggtgttttatattgaaggttgatcatgtaggcacccccttgcctaacacataccaaaattccagactcccagaagaaaagcaggtattcagcataaaccatagtgtttgtacaaaccattatcagttggaggcaggaactctcctgaaatccaagttctcaggtgtcagccaaaggctaactcctaagcaggccttctacaaatcagcaatcaggcccactacattaactctttttctatataaacagcaataggaaactaatatgttggtttaaaaaaaaaactgcataacgcaataattataactgtgttgctgggtatacaatatataataatataattcacataatattaacagcacacaggaaagggaaaggatagagttacataaaagaaaggtgtttatgaccaagtgcagtggctcatgccataatcccagcactttgggaggcctaggcaggcggattgcttgagcccaggagttcgagaccagcctgtccaacacggtgaaaccccatctatacaaaaaaatacaaaaattagccgggtgcagtagtgcatgcctgtagctcccagctacttgggaggcttgaggtgggaggatcacttgagcctgggaggttgaggttgcagtgagctgtggcactccagtctgggcgacacagcgagactgcctagaagaaaaaaaaaagtgtttgtataccattgcaattaagttgatattacctcaaactatgttattataagatgttaactgtaatccccaggtcaactagaaaataagatgaaaaatatgagtgccaacatgacactatgaatggaaaattccacaaacctgtcctcatgtgatatgtcacagtcaaaaggcagatgcacaactcagtttattcagcatcccccaggagaaaagagaccctaccagccccttccactgtaatatatcttttccatgcatgcccaaattcccccatgcaagaggcctacaagggtaataatagaaactttgtttcagacacaaaattattttaaaaattgttggctagtacagtggctcacacttataatactagcaatttgggggggccaaggtgggaggatcacgtgagcccaggagtttgagaccagcctgggcaacatagggagactcccatttccaccaaaaaaaaaaaaaaaaaagatttaaaaaacaaaatgccaggtgtagtggtgcatgcctgtagtcccagctaactggaaggctaaagtgggaagactgcttgagccagggaggtcaacgctgcagtgaactatgattgtactccagcctgtgtgacagagcaagaccctgtctcgaaaacatttaaaaaattgtataaaattacctttagctatatgaataagatgtatatgaaacataaaagaatttcatgtttagacttgggtccctttcccaagatacctcactatgtatatgcaaatattacaaaacatgaaaaaaatccaaaaaacttctggtcccaaacattttgacctgaatatgttgcctacaacagacactttttttgggggacaggaggagggtcttgctctctttcccaggctgaggtgcactggcatgatcacagctcactgcagccttgatctgccaggctcaagcaatcctcccacctcagcacccccgagtagatgggactacaggtgcatgctatcacacccagctgatttttaaaaaaagattttgtacagattacccagactggtctcaagctcctgggctaaagtgatcctcccagtttggcctccctaagtgctgggactacgaaccacaacacctggtccacattttaaattcgaagacaaaataggttgacagtaaaaggatagaaaaagatatactatgcaaacagtagtcaaaacagacctgcagtggctacaccactatcaggcaaaacagacacaaaaattgttgtgacaaacagcattttataatgaaagatagccaatacatcaaaaagatatagcaattataaacttatatgtacctaacaacagaatcgcaaaatacacaatgcaaaaaagtataaaattcaaggaagaaacacaattcaaaaataaaagttggagatttcaatgccctgcgttcaataacggataaaataagtagacagaaaatcaatgaggaaatacaagacttgtacaacactataaactactaggcttaacaaacacctacagaataatcaacctcaaaacagcagaatatacactcttctcaaatacatataggacatttccaagacagaccaaatattaggtaataaaacaaatctcagtaactacatggattgaaatcacacaaagtgtgttctctgacaaaaatgcaataaaattagaaattggcaacacaaggatatctggaaaattcacaaatatgtgaaaattaaaaaacataaaaataatcaatgggtcactagaaggcataaggaaaattagaaaatactttgagataaaaatgaaaacacatcaaaacaaaatgtattggatgcatctaaagataaaatttataactgtaaatatttacattgacaaacaagaaggatgtcaaatcaataacctaacctttgaccttaaaatactagaagatgaggaacaatttaaatctgaaacaagctaaaggaatagggagtagaaaataaaaataccactgaaatttaaaaaaaaaatcaagaaaacaaaaattggccctttgaaaagatcaacaaaactaacaaacttttagctaatcaaaaaaagaagagggaaaacacaaataactaaattcaagaattcaaaagggagcaattacaccaacctttcagaaataaaaaggataagagaatactgttaacaactgtacatcaacaaattagatgactgagatgacacagacaaattcctaaaaagaaacaaattatcaaaatcgactcatcaagaagaaattaagaatttgaacagacctataaaaagtaaaaagactaaattagaaatgaaaaatttctcacaaataaaagccctggaccagatcacttcaaacatttacagaatttacaaaaactggttttaaaaaaaaaaaaaaaaaaaaaagaaggaacacttcccaattcattgtgaagccagtattactccaataccaaaaccagacaaagccatcacaagatgagaaaactaaagatcaatatctcatcaatacagatgcaaaaatcctcaataaaatactagcaaacctaacctagaacattaaaaaacaaattatataccatgcacatttgggatatatccaacaaaatcaaggttggttcagcacataaaatccaatcaatgtaaaaaaccacattaacagaacaaagaacaaaaaccaggcaggcacagtggctcatgcctgtaatcccagcactttgggaggctgaggcaggcggatcacctgaggtcaggagttcgaaatcagcctggccaacatggcaaaaccctgcctctactaaaaatacaaaaattagccaggcatggtgatgggcacctataatcccagctacttgggaggctgaggcaggtgactcccttgaacctgggaggcagaggttggcagtgagcagagatcatgctgcactgtactctagcccgcgcgacagagcgagactctgtctcaaggaaaaaaagaaaaaaaagaaaaaagaacaaaaaccaaatcatctcaaaacatacagaaaacacatgtgccaaaattcaacacccttttatgctcaaaagataacaaacagaagaggacataatcaagttgattatggtgaaaaacttcatggtgaaaaacaggatacattcccagtaaggccaggaatatggggatgtccactcttgccacacatctatttaatattgtactagaggttctagtcagaagacgaggcaagaaaatgaaataaacggaatccagactggataagaagtaaaactatacccatttgcaagtgacataatcttagatacaggaaaacctaagaaacaaacaaaaacagtattagaatcaataaacacgttcagcacagatgcaggatacaaggtcaacattcaaaaatcaattatatttctatacattagcaataaacattctggaaataaaattaagaaatcaatttcatttacaataccaccaaaaaaaataaagtacttaggaacatatttaacaacaacaaaaaaatgcagcttgcactctaaaaactacaaaacactgttgaaagaaattaaagtagacctaaatatacagaaagacatcccatattcatgaatgggaaaacaatatttttaagatagcaatactcccaaagttatctacagattcaatgaactctctatcaaaattccaatggcctcttttagcagaaacggaaaactgatccttaaattcatatgaaactgcaataggcactgaatagccacaacaatactgaaaaagaaaaataaagatgctcagtatcatctgtcatcagggaaatgccaataaaaatcaaaatgacatactacctcacatccagtaggatgactataatcaaaaagaaagacaatgacaggtggtaatgaagatgtgaagaaatatgagccactgtttccactcctattgtatatacccaagagaactgaaagcacacaaccacacaaaaccctgtaaattcaatgcagcactatttataagaacccaaatgtccatcaactgatgaagagagaaacatgtcctatatccatatgatgaaatattattgaccatgtgtggtggcttacagattacatctgtaatcccagcactttgggaagctgagataattggatcacttgaggtcaggagtttgagaccagtctgtccaatgtgatgaaaccctatctctactaaaaacacaaaaattagctgggcatggtggcaggagcctgtaatcccagctactcaggaggctgaggcaggagaattgcttgaacatgggaggcagatgttgcagtgagcccacattacgccactacactccagcctggacaacagagtgagacttcatctccaataaataaataaacaaataaataaaattcagtcattaaaaagaataaagtacctatacatgctccaacatggacaaatttatgctaagtggaataagccagatttttaaaaagccccatattccacttacatgaaatgtctagaatagcaaatctacagagactgaaagtagattagtgatttcctaaagccagggtatgggaaatggggaatgactgtgaatgagtatgaagtatcttttgggggatgaggaaatgttctggagtgaggcagtggtgatggttgcacaactctgtgaataaatgaaagattactgaattgtagtatttaaaagggtgaatttcatggtatgcaaattataactgaaaaaggaaggaagggagaaaggaaggaaacaaaatagaagtggctggttctatgaataactagagatcatttgctcacctagagaagcaactgcctcagctccagtcaatagctgctacagaagttcgggctcagtattatcagatatgctggtttttcaaaaagccctaatccaaattttaatgtgagatctccccaatttcaaatattagcaactaattcaaatttttacaaaaacaaccatgttatccttgcatgctgccattttgtaagcactgacaactttaatttctttttagttatattattttcaaatgtcaagtaacattaaggaattatcaaagaaaaaatgtaaaaattattaacacagaatataacataaaacaagaaagtgttcctttcttttctttctttttttttttggagacagggtctcactttgttgcccaggttagagtgcactggcatgatcactgcctgcggcagcctcaacttccctgactcaagtgatcctcttgctgcagcctctcaagtagctgggactacaggtacgcatcatgcctggctagttttttgtttttgtttttgtttttttatatggcgtctcactgtgttgcccaggctggtctcaaactcctgggctcaagcaatcctcctgcctcggcctctcaaagtgttgggattacaggccatccagcctggtctcgagaaagtgctcccttcatcatgcctatcagtaccatttcaagggcaaccactgtattacctcagtttttaggacttttaatcaagacaaatataagactaaattttaaacagctgagaagaaaacatctagtctaaacatcttattttaaaatctgagggccaaaaagataatataacttataaagttggacaaagctaagacttgaatacctgtttcttatttcttactcaagtaaactttccataatgccatatcactccaatttaccttttgaggaaacaactagctggaatacaaaattctcctaccatacatatgcacatagagaaagtcacaaagtggttggggaagttttatttagtatattctctttcaataaaaatttaaattctcaacgaaatttttcaggtggttttgttttgttttctgtgacagggtcttgcactgtcacccaggctgatgtgcagtggtactatcacagctcactgcagcctcaatctcccgggcttaagcaattcttccacctcagcctatagcatttgctaccacgcccagctaattttctgtagagatggagttttgccacgctgccctgatgtctgcaagtaccaatccccactgtacggctgaggaatcagaatatgactgagatacagctgatttagaggaggtaattgcaaaatgagcctaaaacatctcactgaaccagaaagaaagcacataaagacttatggggacatgtcagaaggccacaggcacaacttgaaggggattccacttatcaaatatgggacaatttgagcatcaaaataaaaataatgttggattacaggcccactgaatagaaaaaatgaaacaatgaagttaggcccaatagctataatctcagctactcaggagactgaggcaggaggatcacttcagcccaggggtttgtatcccaccagggcgacatggcaagatcccatctcctgaaacaaaaacaaaaacaaaaaaaaaaaaaaaaagaaagaagaaaaccatgagtccataaaaacaaagataaacaaataaatcaacaatgggaggaagagaaagctttttcttacagtagaatgtcaactaatgaatgtaataaaattagaaagaccaccattcagcaatcatcaatagaaataattaagtaataattcaaccaagaaaaatcaacaaatgctaaagctagtggatgaaaagtgtgatgaggaatgagttacttagtttcaacacaccatctccaaaaaataatcatttccactcatttttcaaaggaaaaaaaagtaccctttctagtgtagaaagccagcagacaaaaaaaaaagcttaagtcaagtgatccatgttaattaagatcatcagtaacaggcaaattaaaatcatgtacctaactagcctgacttcaatttttaaaaattaaaaaaaagtgccaactggtaaggtaacactgagaagaataccacatcacctctgtgatactgctaccaaaaattgataacctgaattgattcatagggaagcattagacaaatctcaattgagaaatagtctaagaattaactgctctgtaaacctcaaaactgtcgaaatcatgaaagtcaaggaaacgttatggctgttctagattgaaatacatcaaaaagacacaacaactaaatgcaaattataatcctgattgaattattttcctaaaatgagcattattgggactactggcaaaacttgaatgggttctgtggattagatgatataatccacaggttctatcaatgctaacctcctcattttgacagttggattctggatatgtagaaaaatatccttattgatagcaattacaaactaaaatattgtggggtgatgggacctcatgttagcaagttactctcaaataatcaaaacaaatttctttatactggttttgcaacttctggaacttatttcagaagaaaaaaattgtaaaaacaaaaacaaagtgaaaaaaatctattcttctccagtcttatcaagaagcatctctatttttccagttgctcaaaacaaaaattttgagataggcttgacccctctcatgctctcaccttatattccaatccattagcaaatcccattagctttcccttaaaaatatatttcactactccaagccataatcctctcttgcatggattactgaaatagtttcatatctgatcaacttgattttactccaaactctaatataactcatttcctatacaacaataaggatcacccttttaaaaagtaagtcagagaatgttaatgctctctctctgtcagaaagtactggtagtttctctactttgaataaattccaaagtccttgccatggcttacttcatataatctagacttccctacttcttgtttttttgtgttttttttttcttttttgagacagggtcttgctttgtcacccaggctagagcgcagtggcacaatcatggctcgctgcagccttgacctcttgggctcaagtgatactcccacctcagccacccaagtagctggtactacaggtacgcaccaccatgcccagctaatttttgtattttcggtagagacacggttttgctatgttgcccagtctggtcttgaacttctgggcacaagcaatccacctgccttggcctcctaaagtgctgcgattacagccgtgagccaccatgcctggccaacttccctacttttggtgttatattctactacagtaaaggttagatacagaacactgctacttccgccaagactaacacaatggatgatcccatccccaccactgcaaaaaaagaaaagaaaagagaaggttgtttaaataccggtaggctaaaaacataaatatccattacagcttccatggcaatgcactctcacgagtctccattcttcaccccacttcccacatctcacctgagtctgcttcagaatctcttcttccttgtttggctattaaatgccagtgtcatttgaagtttcattcttgcactactactcttttcattctattgagtctcttgaagaaacatcacctataaactaaccctcaaatctgtatctccaatctagacagagctaagcttcaaattccaaattatataaaactagttgttagatattttaatccttggccacatgcttaggatggcaaagcagtaagttaaaaaagagtgcatgcttccctctccctctccctcctcctccccctccctccctctccctctctttccacggtctccctctgatgccgagccgaagctggactgtactgctgccatctcggctcactgcaacctccctgcctgattctcctgcctcagcctgccgagtgcctgcgattgcaggtgcgcgccgccatgcctgactggttttcgtatttttttggtggagacgcggtttcgctgtgttggctgggctggtctccagctcctaacctcaagtgatccgccagcctcggcctcccaaggtgccgggattgcagatggagtctcgttcactcagtgctcaatggtgcccaggctggagtgcagtggcgtgatctcggctggctacaacctccacctcccagccgcctgccttggcctcccaaagtgccgagattgcagcctctgcccagccgccaccccgtctgggaagtgaggagcgtctctgcctggccgcccatcgtctgggatgtgaggagcccctctgcctggct

SEQ ID NO: 368 - DNA, 70266 bp, Homo sapiens
gatgacacgtacccgtagtcatagctactcaggagactgaggtgggaggatcgctcgagcccaggagtttgaggttgcagtgagctatgatcatgccagtgcactccagcctgggtgacagagtgagatcctgtctctaaaaaaataaaaataattagaaagaatatgattggaaaaaaataaaaatacaagtaaaaataaaaaagaactcttgtgaggaaagcatctaacaatgctagacaaaaagtaagtaaccaacaaatgcaagttctccctttaagctcttctccacactggtaccagatttgtactgctaaaagtcctgttctttcctcttattatggaggaattatcctagctcatagccaacctcctcactcatatacatgcttactcaagggcatggcttcagcagttctcctctctctcctgcatcatcaatttttccctctctcctggatcagtctcaatcaacatacaaatgttatgtttcccatcttaaaaacaaacaaaaagtctgttttgactccactaccaactacagctgccacattttctccttcttctttgtagtaaaacttcttgaaaaagctataacctgtatactcaacattttcaattcctcttgaacctactccaatcagatttttgtcccatacactccaccaaaacatctcaagatcaccaacaacctccacattggtaaatctaattaccttctattcatcttcatattatttgatctgtgtgacacagttgattactctctctttcttaaaacattttattcacttggcttccgggagttctcactttcctggttttcttctttttggctcttccttctcagtgtctttggctgattcctcttcattttcccaacctctaagtattagagttgccccaggatccagtcattggaactctttgcttttctgtctacactcatttcctaagtaatttcttcagtcccttgggttttacatattatattgattctgaaaacctccaaattcccacttcactctcaaccttcttcctgaactcaggtccaaatatcaaaatagcctacttaccacatccacttgggtgagctcttcatatttctactcaaacctgtccctcctgcagtcttctttgtgtcaaataatggcaactccattcttctagttgctcaggtcaaaaagtttggtaattggtgaacacgccgtccacgtgcgccttgctgtctctccattatcgcttgagatctccagccttaccgcggcttgaaatggaccccaactgctcctgcaccactggtggctcctgcacgtgcgccggctcctgcaagtgcaaagagtgcaaatgcacctcctgcaagaagagctgctgctcctgctgccccatgggctgtgccaagtgtgcccagggctgtgtctgcaaaggggcgtgcagctgctgtgtctgatgtggggacagctcttctcccagatgttaatagaacaacctgcacaacctggttttttttccttaatacaaccctgagccatttgctgcatttcttttcatattaaatatgtgaatgacaataaaacaattttgacttgaaaaaaaagtttggtaattggtaatgtgactctccgctttgtctcatacctcctatccaatccattaacaaattctgccaactctactttcaaaatctatgattccaaaaaaatccaaaaaaagtgtaaagggaaaaaatacaaaatacaaaaaacaaaaaattaaaaatcaaagtctatgagaatccaactacatctctgtatctctacttggacccaggtctgagccgccatcatcttgtacttggattattgtaatagcctcctaactggcctttctgatatggtcttaaaaccttttctcagcccagcaaccaaagtaattctgttaaaacataagccagaagatgtctcttccactctcagaacctctcatcagtttttgttaagagacagggtctcactcttgctcaggctggagtgcaatgcaatgatgatcacatagtttacgacattctcaaagtcccatgctcaagcaatcctctcacctcagcctcccaagtagccaggactacaggtgtaccccaccattcctgggtaatttttttttgtttttggtagagatggtgtcttgaactcctggcctcaagtgatgagtgagagtatcaggagatgacagatgatgatcaggtgagaggatcaagagactgtcctacctcagtctcccaaagtgctgggattacaggcatgagccaccatgcccagccccatcagttttttatctcatgtagaccacccttccctccataaccttcatctcctgatactctcactctcttccactctaaccacagtgattcttacccttttcctcaaacctaccaggcacgttcttgcctcaaaacttttgcatttgctgttccgtctgcctggattcatttctttcagatatctacatggttcactcccttgttcctccagatctttacaaaaaactcacttttttactgaggccttccctggccactccatccaaaaattttttttttttctctctctctctctctctcacacacacacacacaccattcagatttcaagtcctaaatcctgcttttctcaacagaaaaaaaatgctatttaactacatatatatatttaaatcattttgttcgttgtctatcaccccagtttttttgtttgtttgtttttgttttgttttgttttgttttttcttttgagacagagtctcactctgtcacccaggctggaatgtagtggtgcgatctcagctcactgcaacctccacttcccgggttcaagtgattctcgtgcctcagcctcctgagtacctgggatgacagatgtgcaccaccatgcccagctaatttttgtgttttttagtagagatggggtttcaccatgttagccaggctggtcttgaactcccaacttcaggtgatctgcccaccttggcctcccaaagtgctgggattacaggtgtgagccaccatgcccggcctgctccattataatttaagttccatgaaagcaggaagtgttattagatttgttcaaagctctatcatcccagtaccgagaataatgttcaacacaaaataggtgtttcacataagtatttgttgaacttgtttcttgagtgaaatcaaacgttatcattttgctcctctgttttgggtcattctgcccagaacagagtactcatgccttttggtctcaggaccctctctacactcaaagtattgagggccagacacagtggttcattcctgtagtctctggtacttgaaaggctcaggtgggaggatcacctgagctcaggagtttgaggttgcagtgagctatgattgtgccactgcactgtagcctgggcgacagggtgagaccctgtctcaaaaaaaaaaaaaacacaaaaacattcaggctgggcttggtagctcatgcctgtaatctcagcactctgggaggccgaggcaggcagatcatgaggtcaggagttcaagaccagcctggccaacatagtgaaaccccatctctactaaaaatacaaaaaattagccaagtgtggtggctggcacctattacgtaatcccggctacttgggaggctgaggcaggagaatcgcttgaacctgggaggcagaggttgcagtgagccaagatttcgccactgcactccagcacgggaaatagtgcgagactctgtctcaaaaaaaaaaaaaaaaaaatttcaggactccaaataacttttgaaaattcaggactccaaataacttttgtttatgtggattctgtctattgataagtatcacactagggatcaaaactgagaaattgttaaatatttacatactaattcatttaaaataacaataataaacatgttaacataacatttttatttttaaaaaaataataaaaatttagctgttttgttccaaaacgaaacaaaaaaaatagtgagaggaatgctactgttttgcttttttgaaaatctgttttatgtctggtttaatagaagataattgtattatcctatttacttctcattcaatctgtataatgtgccatgaagccctggaaaactacccagtactctcatgagaaaatgagagtttaaaaagaaaacaatgtcttcgtattattatgtaaatggttgttgtctccatatatatctgttgtctttgtacatagttttccctcccattctacatagcaaactcctgctggtcactcaaggtctgtctcacctgccatctctagacagtcagttgttccctcctccctactcccatttctctattatagcacatattatgttatcttgttatctggataattgtctatcttcccaaccgactatcttcctaaagaaggcaactataacttgatcttctttacatccctagccccactcacagtatctagcaccaaaaagatatttaataaatattagttgaataaagaaatatgaggccaggtgcagtggctcatgcctgtagttctagcactttgggaggccaaggcaggtggatcacctgacgtcaggagtttgagaccagcctggccaacatggcgaaaccccatctctactaaaaatacaaaaattagccgggcatgttggtgggtgcctataattccagctgctcaggaggctgaggcaggagaaccgcttgaacccaggagacggaggttgcagtgagccgagatcatgccacttcactccagcctgggcaaaagagcaaaactccatctcaaaatatataaataaatatgaaaggaggtgaagggaagaggggacccagtttatctacagtgagctcaggcactgatataacatttcttttttttcttttcttgagacagggtctagctctgttgcccggactggagtgcagtggcataatcacagctaactgtaatctctgcctcctggcctcaagtgatcctctctcctcagcctcccaagtagctgggactacagccatgtgccacaactcccagctaaatttttttttttttttttttttttgtaaagacagagtttcaccatgttgcccaggctggtcttgaactcccgggctcaagtgatccatcctccttggcctcccaaagtggtaggattacaggtgtgaacaactgtgcccagccaatatcataattcttttcttttctttttttttttttcttttttgaaacagagtctcttgtcgcccatgccagggtgcagtggcacaatcttggttcactgcaacatctgcctcccaggttcaagcaattctcctgcctcagcccccaagtagctgggattacaggcgtgcaccaccacgcccggctaagttttgtagagatggggtttcaccatgttggccaggctggtctcgaactccagacctcaggtgatccacctgcctcagcctctcaaagtgctgggattacaggtttgagccactgcgccagccccaatataatatttcttgttaagattatcagtgtcaaaggttttccaacatcacactctggggactgttgtggggtggggggaggggtgagggatagcattaggagatatacctaatgctaaatgacgagttaatgggtacagcacaccagcatggcacatgtatacatatgtaactaacctgcacattgtgcacatgtaccctaaaacttaaagtataataataataataaaaaaagaaagaaaaaaacaaacaaccccattaaaaagtgggcgaaggatatgaacagacacttctcaaaagaagacatttatgcagccaaaaaacacatgaaaaaatgctcatcatcattggccatcagagaaatgcaaatcaaaaccacaatgagataccatctcacaccagttagaatggcaatcattaaaaagtcaggaaacaacaggtgctggagaggatgtggagaaataggaacacctttacactgttggtgggactgtaaactagttcaaccattgtggaagtcagtgtggcgattcctcagggatctagaactagaaataccatttgacccagccatcccattactggctatatacccaaaggactataaatcatgctgctataaagatacgtgcacatgtatgtttattgtggcactattcacaatagcaaagacttggaaccaacccaaatgtccaacaatgatagactggattaagaaaatgtggcacatatacaccatggaatactatgcagccataaaaaaatgatgagttcatgtcctttgtagggacatagatgaaactggaaatcatcattctcagcaaactatcgcaaggacaaaaaaccgaacactgcatgttctcactcataggtgggaattgaacaacagaacacatggacacaggagtgggaacgtcacactccggggactgttgtggggtggggggaggggggagagatagcattaggagatacacctaatgctgaatgacgagttaatgggtgcagtacaccaacatggcacatgtatacatatgtaacaaacctgcacattgtgcacatgtaccctaaaacttaaagtataataataataataataataataataaaaagcttttcctagcagctggtcagtttaccatatagttcattaagtgaattccaaccactcatgtggtctttcaagtgaagtggagaagacagaggtcattcatttcattttatgaggcaaccaaggcccaaataaatgaagtgacttgctgaaaggcataccaaaagtcagtgacagagccagtgcttgaatcaggtatctgacgttaagtcaagtgctgtttccattttatcccatgctcatcatggtgactggaggctgcaaagtcagagttcccgtgattctatcttggggtgttgctctgaaaccttctaaacctcctcttgaactgatttcacagcagtctctggaccgtcctcttactaaggactatcttagggatccattttataagcaaccattgacttctatcagcctcttctttccttatcatcaatacctactgccattcacatccgccatccttgggagctggtcaaggtggaccaccacagtgctatatcatcatcggcagttccacaagcatttggtattagaggaaaggagaagaataagacagagctcagtccagtctgttccccttcattctttgaatatactatttcttctttctggaatatatcccctcccaaaccttccaactttggcagttcattgctctttcctcagtgtttccacaacactttgttctcattcgtgtcataactcatcatgtaaccacaatgatttgtctctatcatctccctaccgggactgtgagctgttcacctcaatggtgttaatacagtcttcagtctctttgatttccctgagactgtcaactccttctctctctctctttttttttagacagagtctcactctgttactgggctggagtgcggtggcgcaatctcagctctctgcaacctctgcctcccaggttcaagcgattctcaggcctcagcctcctcagtagctgggattacaggtgtgcaccactatgcctggctaatttttgtattttttgcagagacagggtttcaccatgttggccaggctggtctcaaactcctggactcatgtaatccgcctgctttggcctcccaaaatgctgggattacaggtgtgagtcaccacgcccagccaactccttccttttctttgaacctctcttcttctttccggtgatactccacaatcctgattcttcagtctttttggacaatctttagattcacttttggcttgacttttctcaggctctgaatatgtatgtctcaggatggaactcttggccttttgctctcttcaactctttgctttcagcttcaactaccgtatttacttgaaggtgtccaaaatatccattctccaccttcttcgagaactcattcccatacccatctcacagatcttgtggtcaccccagtttcagcaagtctaaaaccgagctccttgtcacctccttcaagccagttcctccacatgaggactccgtttctgtgaagatgctaccatccatctttctcgatttgccatcactccaaactcctttccctcttcttgtatgcccattgtctcttaaatctgtctcttttctcacccccatcctagaaaaaaatgggttctgaagtcaaatcgattcagctctatcacttatgaatcacgcaagtttggcaaacttattcagagtcttccacttctttatcctaaattaggggtaataatagcatctatttcatagggtttatctatgaagattaaatgagatatcgtggaggaaagtgcttagcccagtaactagtatgtattaggcactcaataaatgttaattattattgttatccttatttccttatacttagactattacactagtctcctaaccaatctctctgcctcctctggtcattattctctccactgggaggggaactaacatggaatatctattaagtgtcaagcacctcatgctgaaagcaatcttatacagtaatagtagcatcattttataaaaatggaacagagccaagatatgaacataggtctgacgctaaagcctgtgcccttttttcatctccaaattaccacgtaatcataaaatactattttcacacatcatcctgcttaaacacacacatacacacacacacaccacacacacacaacctttaatgaccaccctcccccattttccttcagaacacaacccaaatttattatcctagcattcactgtcttgtacaacttccctcacttcccaacactttcctataggaaccctgtgctccagagaaacttatctgccgcctcaggcacatcctgtacaccctcaacttcctccctgaaatgccctctcctctcccctcccctggtttaaatccagcctttccttcaggtcctagctagagtcccaccctcctccattacactttttcctaacttccccagcccctcatcaggtctccctcgacccctggagcagccgcctgtatccttgttgacacgtggtgtttgccattctgtttttctttgcgtttatgttttctcatcaagctgtaaacctctgcactccaggaaatcggccttctcttttttgtttttgtttttgggtgtttttttttttcctttcagcatcccaagtagcccagagccctacaaatagaaagcgcttgataaatatgggttgttttggatgaaagatgatcttcccagctggatgagctctttccctctaggggtgagggactgagcttcacctcaacttcacctaatgtctcacaggaatgccccctcttaaacgctcctcaggtcttctctacccctttcccccaccaccccggcccaggagagccactcagagctccctctccggagtcaccctctcagacccagggctatttctttagcttgctctcgaaccccgcctttaccccagagccgctcctcagtctcctcccccaggctgcctctcaggccccctctcctccaatgccactccctaggaccctctccccagggttccggacccccaaccccggatatgttcccccagggccatccagttgttctacctccaggattactgatttagcctcttccccctcctgctcagggctacccccagaccccgacctccagttccaccccttcggaccctgcctctagaactgttcttttagcctctgcaaccccctccccagcgccgctccgcggcccctgccccagggctggtcggggagccactgccctcgcaggtcccgcccgggtgctgcccccgcgcccccggccgccccccaccggggcggggcgcgcggaggcgggggcgcgctggcggccgaggcggcggcggcggcggcgaaggcaggcgggccgggcgcgggccccgccgccgggatgccgaggagccggggcggccgcgccgcgccggggccgccgccgccgccgccgccgccgggccaggccccgcgctggagccgctggcgggtccctgggcggctgctgctgctgctgctgcccgcgctctgctgcctcccgggcgccgcgcgggcggcggcggcggcggcgggggcagggaaccgggcagcggtggcggtggcggtggcgcgggcggacgaggcggaggcgcccttcgccgggcaggtggggctggcgcgcggggccggggcgcgggctcggggcatccgggcagggcggggggcggcaccggggacgggcctgggccgggccgcacctactgccgaggtcgcggaggcggcgcgccgggggtccgcgccttgggtccgggctggcgcggcccagggcgggggctggggagggcctcgccgagggccgccgaggccgggagctgcttcagcaccgcggacaggggcagcgggcgggggccgagcacgagggtcgggtttgttgtgttggcagtggggtgtgtggcctgcatgactatgtgcgagggaaaccgtacaacgcctcggagtaaatagtaagcgcagccagtctgttgtgggttgggagaagaaaccgaggatgttcaagctggagaagggggagggggagggcggaggaaggactcgatcactgtcttcgtagctgaagggctgtcaggtggaggtaggatagacttgttctagcttggccccacagggcagaactagggccagcgggagtgggggttgcaagaagacaaatttgggctcgatataggaagaagtttgtaacaattggagctgctcaaccagcttaggaggcggcgagctgctcatcactggcatgtgcaagtaaaagctctcggaggggattggatggaggcatgcataatgcttgcatggatgcatacatcatcatcacaataatgccagctagcatttactgaacactcactatgtgccaggcctggtgctatgttttatacgaattatccaattcaatcctcataactactctatgaaatagctgcaattattatccccattttacagatggggatacagactcaaagagcttaagtaacttgcccaaggtcacacagctagtgagtgatggaattggaattctaacctaggcaggctgactctagtctccccttatttacccatgaccttatcctatatctcatggggggtgcagttggactaatttctctagtatcttccaacctagaggactgcaatattctaataaatgatgttgggacaatggtgttttgctgaggaaaatcagagtgatagcctcgccaccctaagagatggagtatatttgttgaagcaggcagtctgtttgtttagaagaatctgcctcaagagatattcttaattgggcatggagctcagggggtcatacgtgcactgaaattgcgtacaaatttgtaagtgcaaatgtgtgtatttctaggcgaggacccctagatttcttcagcctctcaaagggttacaggttccacaaaacaacaaaaaagatatggtgtgtaaaagaacctttagtgccagttggcagttgtcctccaaagattttataattgctggttgacttgttgtggaaactttgcttagcctctttgtgttttcacatgtgttttatcacatgttaaagtaatgcatttcctaagtttataccctagaagaaagattgctttagactgcctgagtgcacaggatgaggtggaaagaccctggcctgggattaaggaggcctgggctctgatctgaccttggcccccattggtttgtgtgaccttgagccatttccttgccctctctaggcttgaatttcaccatgtctaacataaagagatagagctagacaatctcaactctgaaacttttttattcctacaatatttcaagcattaagaggaagctagtccttacctgtatcagttttataggctttgattattccacctcttagcctttgtctttttaaacttaagtttccccctatgacacgagacccctagaatagccacactcattctctgggtcattttagttgtccttttctagataccttttggccctaattttcaatagatgtcaacttgaccattgtctccagatacaggaccctacggttttgcataaaggaaggttggtttcttctttgctctcctggtcccatcctgcttcccccttccctctgtcagctttcctgatctcaacacactaggccactgcctttagggaacaatctataatagctcccggagccttttcctgggtcaaaactgatagcctggaacacaacaccctgtatgtggattatttttatcggagtgcattaccttacatttctccaccttgacgtttgtctgccatcttgcattgcactcagtaacttccttcaagcattcgctcactctctctctcccttcctccacctcttcctccttccttctcttttggcatagcatttccctgtctgaaagggcttaatatgatctgaagtcttgaaattttcactttgctatatttcttctggatcacttataaaaaatttaagtgagacaggtcccagcatggtctcttggggccccctgcactcttaatcccctttcattcacggaagtgaccatttatatctatctattgttttctaagtgacaaaaacatcatccttaatttgacaatgactccattttaaatgtctaatacattgtccaaaacttcctgaaagatagacaaattatatccactgcttctctcaataatttgtgcctaattatcctttcactgaacactaggggatcacttgattgacaccttatagaaatattgttgcttttaagccggcagataatattgcttactcctctttctgtcttttaagccctctggagtctgtctccaccctacccctccattagcaggccatatttcccactgcttattgataacgcatccttactcgacaagctcatctctcctttacccttagacaggctgcccatatttctctggacattgtcacatagttacttctgcacccctacccgttcatttgaaacctttccttaaagtttcagctcaagccctgcttctccaataaactttccctgatttctctagttgtcattttcttctctcttctccaggaaacatttttaaggcagccccagccagtttgtcatttatttatttacttatttttatttattttatttatttatttttgagacagagtctcactctgttgcccaggctggagtgcagtggggtgatctcggctcactgcaacctccgcctcccaggttcaagcgattctcctgcctcagcctcctgagtaactgggattacaggcatgcaccaccacgcccggttaatttttgtatttttagtagagaagggttttcgccgtattggccaggctggtctcaaactcgtgacctcaagtgatccaccttcctcagcctcccaaagtgctgggattataggtgtgagccaccgtgcccagccctatttattttttaatagttaaacattatttttggggagaggaaggttggttcttaggcaaggctttcttgaccaaaatgttttatttttttacattgaacaaaatccctgattctcaatgctcatcattaagtattcaatgagcaatcaatgattctactctttatcctttatctcaaaaagttacatggatctgaaataggcactcatgggcatggggctccaagcccccttctaaaacccttcttagagatgggactcattgccaacttgtactttcttcggtagaaatcaagcctattccttttggcagtggttccacaagctcacccttgagttccttcagaactctttaggtagtcttctaatggtagtggcatcaatagaaagaaattgagagataaccgtgaccttagagatcacccagtacctactacagcacttactagatacttctttaattgagttgcccaagggcacagaacgtgatagtagatgattcggaactactgtagaacttttcctagttctcctgatttctaaattgaaagcatttttcatcatcattgatttttcatttcgtatctatgatctttcattaccaagccaaaaaatttttttattcagtctatcttctcctttgctttatttttctccacaccccacaacccccgaccccttgaagctcaacaaacaggatcctatgctttctttagtctttcttttttatcttacacatcaagaggtcccactgattctctaactggcttccttcatttgatttattaaaagcaccacttctcttatttgctgagtagaatgctcctcaaatacttttctggccttcctagtttccaacttgattctgaggaagatcagaacaggatgaaagagacaagtcaattatcacaggccacatgaataagtaacagagtgtgactcctagacccaggacttatggattcctgcccttgagactggttttgagtggtttgtgctgaggagatggagaacagtctttggtttgaaactgtagtcaaggaagattgaccccgaatgattggaggggtaagagagtgacctactaagaagcaccaacgtattcccaaatcaaaatattctttcactgtgatcatggcctccagtatatcttcattcttgtctggaaaaaaaaaactcactattaggaagttttcccttttacataagctggatctagtctactgtatttttaattcattttctcttatttttactgtggggtttcatattactttaatagctgtttatatttgtaaggtgctttgcacttcccatatgccatgtatgtggccctatttggtcctgggaacaataccatgaggtagataaggaagacattgtcctcattttataggtgagtaaaaggagactcaaagatgatgtgaattgcctatcatcttgtctaaggacccacacatagctcataaacattaaagcaggccaggcatggtggctcacacctgtaatcccagcactttgggaggccgaggcaggtggatcacctgaggtcaggagtttgagactagcctggccaacatggtgaaaccccatctctactaaaaatacaaaaattagctgagcctggtggtgcatgcctgtaatcccagctgctgaggcaggagaattgcttgaaccccgggggcagaggttgtagtgagccaagactgtgccacttcactccagcctgggcaaaagagtgaatctccgtctcagaagaaaaaaagaaattaaagcaaataacagaagctaggttttctgttcttgggctcagcactctgcccactatacaagtttcctgttctggattattattgtagccttttagccagtcttttctactttcaagtatgtcctactctggtccttgaaagaggtatttttagaactaataaaagtaaattataattgtacccaaaagactaatcttaggaaatgcctagccctatagtatggtattgtttgaactcaaaacaggaagaacaaaccacagccaatatctcctcagtacctagcacagtgcatgatacattctggacatgtgataaatattttaaaattaattttgttatctaatccccatcaacttctttgaatagtgcttggcacacaaaagtcgctaccttttgtgaagaataaatgaatgcatgctagaggtataacaaggtgccgggaagcaccgaagagggaggagatgaggttccccagttgaggttcgggaagccagagaatgcttcaggaagaaggtggtatctgagatgaacctttgagggaggagaatgatggagaagggtgagtggggcagtccaggcagaataaaaaatatgaaccatggctccacaaaaatgcatggcatgtttaggaaacagtggataatttgatgtgcctgaatcatcaagttacttgctgtttccagtaagagtgtataaggagaagaggctggagagggagactgagagcagattgtgcatttggcttttgtccaaaggctgaggggagtcattaaaggtttctgagcagaggagcgacctgctcagagccatgttgaggaagtggagggactggagtttgttcctgagttgttctggctgctggctcctgccctgaatgcttttaagctttcttagcacaacttaggggcgagtactcattttagggctcaagtgacccgcccaccttggcctcccaaagggcttacaggcatgagccctggccttgcctgttagcagtaatttaaagactcaattctatgccacaaacacttacgaggcataaagggcaccaaaagtacttggccagaaagtcaggagttgttctttactcctttctctctttatacatatgtatgtataaagatcatttgaggccaggagttcgagaccagcctggccaacatggtgaaaccctatctctattaaaaatacaaaaaaattagctatgcatggtggtacatgcctgtagttccagctacttgggtggctgaggcacaagaatcacttgaacctgggaggcggaggttacagtgagccaggattgaactactgtactccagccaaagcaagactctgtatcaaaaatcaatcaatgaatcaatcaatcagtccactcaggagtcagttatatctgaagcctatatggcaaaaactaatgtttgacaaagctggctggtgattttccaatatatattgttattttatgcctttctgaatgactgaaatattgaataataaaaaaaattaaaaacaaaccaaaatctgatcaccttactcccaccctcacctggcttaaaatgactcttaggacaaagattatactattattactgtactactatcacttcttccttttagttttattatggaaaactttcaaatgcatatgaaaatggaaagaacaatattataaactcccttggacgcagcacccacaaggatcacttgagtccgggagtttgagaccagcctgtgcaacatggcaaaaccccatctctacaaaaaaatacaaagagtagctgggtgtggtggcatgtgcctgtagtcacagctacttgggaggctgaggcaggaggattgcttgagcccaggaagctgaggctacagtggacagagatcacaccactgcactcaagcctgggccacagcgcaaaaccctgtctaaaacaaaaacaaaaacatgcttaatgaagccgatgaggccctgcatgactgagtccttcccatctctctgacttccttttataccacccattctccccattggtcactagactccagtcaccctgcccttccctctctttttctaatatacaggctccttcccattcaggaattcagtaaggtactctttcctggagtctcattctcagccttcacctagcctcttctgttcattcacagatgtcagctgagatgtcatgtactcagggaggccatccctgatatcacagcctatatctcctgccacacacttttgtagctcctggttcttctctttcattccacttatcaccactgtaatgaaatgtttagtatttccatgtctatctctcccaccggctgtaacttccatgaggatgagttcaaaggggactacaggcatgtaaaccattatttataatgtaatacaaaatatgctataaatgaggatacatataatgccattgggagcacatagaaagtccatttaaccccagacagatagccctccctgatgaagtggcattcaagttgcattttgaagtagcgcaccatggggaggccagagtacatatgggaaaggagttctagggagagggaatgaaataaaggcacagaggcaggactctgcaggatatgctcaggcaacacaattaggtcagtatagctagaggttggggtacttgaggtgagcaataaagggtagaaggtacaggacagaacatgaggctggcagaaccaggcatggtggctcatgcctgtaatcccagcttctcaggaggctgaggctggaggattgcttgagaccaagagtttgaggtcatagtgagctatgattgtgccactgcactccagcctgagcgacagagcagaaccccatctctacaaaagaaaacagggctggaaaggtgcattggcatcacattgtaagggttgttgtgtcatgctaaagaatctggactttaagactggcaatgaggaaccagaagatcggcttcacagtcaatccacttaggctaaaataatggaactttttaacatgacttacaggttatttagttcaaccatctccctgttgcagttaagaaactgagacttggtctggctgtggggctcacatctgtaaccctagcactttgggaggccaagctgggaggatcacttgagcccaggagtttgagaccagcctgggcaacatggcgaaaccctatctctacaaaaaatacaaagattagctgtgtatggtggcatacacctacagtcacagctacttgggagactgaggcaggaggattgcttgagcccaagaagttgaggctacagagagcagagattgtaccactgcactgcagcctgggccatagagtgaaaccctgtcttaaaaaaattaggccaggtgcagtggctcacacttgtaatcccagcactttgggaggctgaggtgggtggatcacctgaggtcagaagttcgagatcagcctggccaatagggtgaaaccctgtctttactaaaaaatacaaagaattagctgagcgtggtggtgggcacctgtaatcccagctacttaggaggctgaggcaggagaatcacttgaacccgagaggcggaggttgcagtgagccaaaatcacgccattgcactccagcctgggtgacaagagcaagactatgtctcaaaaaaaaattttttttaatttaaattttaaaaaccctgaggcctggccactggtctttgtcttcacttttcccttttcttaactcaccaagaagtcgagcctcaggggacagaaaattagcagatctgcgggagggccttggacagggtgaggaagactaaggcctctccttttccagagagtgaatgagaccatggccacactcctgactgtgggcagaggcctccccagaactgcaaaacttggacatcccagtgctgacccaaaaccccaaatgtgccacctccccgggtatggtgatcatctggcttgtggtggcctcctgggagtgggccaaggacattctgcagagcgccagggaattcccgctagtgcacttaccacccactcaagagccgatggcagccaacaggcaatgctgcgccattaaggtgtttgtcaagaagctaagctgggcattgtgggcgatcctgagggccctttttagattggctgtaagtgaagaaaaaaaacagcatttggaggcaaactagagctagtgcagagggtgtagcatgacagaaaaccctctgagaggcagagatgcttgcctccatgtctggcttccttaccaacttgctctgtgattttgaataagtcatttcccctcccggagttttctttctctcttctgcaaaacaagtatgttaaattagatgatctctgagtattggtgaccagtgcattttctagatacctgaatgattatgccttcagtatgaaattttacgaattagttatataactcaggtgggctcagcagcaaggctgggacctcagttatatgggtagaggaggaagcagggttttggtgggacaagaagtggagggaactgacacagtgataggacccatccctgaggagtcaccagaaagacccagtgatttggtctggcagcaataaccaaacgtggtggtcaaagaggagaaatgacttattaaaaatcaccaagggctgggtgaggtggctcacacctgtaatcccagcactttgggaggctgaggtgagtggaccacctaagatcaggagttcgagaccagcctgactaacatggtgaaaccctgtctctactaaaaatacaaaaattagccgggcatggtggcgtgcacctgtaattccaactactcgggaggctgaggcaggagaatcacttgaacccaggaggcagaggttgcagtgagccaagatcgcaccactgcactccagcctgtgcgacagagcgagacaccatctcaaaaaaaaaaaaaaaaaaaaaatcactaagagcaagttggtgggggagctgggaatggagccaagcgtctctgcctttcagcggttctttccaaggagtatgggagcaggaatagacaataacattgtacgaacacttactatgtgccagaatctgctaaatgcttcttgctgctgtaacaaattaccacaaacttatttctaaaagcaacacagacttgttttcttacatttctggaggtcagaagtccaaaatgggtcttgctggactgaaatcaagttattggcagggctgcattcctgctggagtttctaggagaggatctcttccttgccttttccagtgtctagagaatgcccgcatcccttggcttgtggccccttctagcagcagcagcactgctataacctatgtctcccaacaccttctctgactcaaaccccctgccttcctcttataaggatgcttgtgatttcattagacccacctggataatccgggctaatctcccccatctgaagatccttaacttaatcatttctataaagtctcttttaccacataaggcaacatattcccaggttttggggattaggatgtggctgtctttgaagggtcattattttacctaccacagtgcatcatctcactgagtcctcctaacagcccttctttaaacatctgtttaacagatgaggaatgtgatgcttagaggagttaggtcatttgcccaagggcactctgctggaaagagaaaagttaggtaatatttggtatgtggtggcatcttggtcccaagtgagctgtctttttagataggaccccattcagctcccaagtgtattgagaatacagtctaactctgtggaggaggctgtctaagaactaggcagggaatctgagaccctgaaaaatagattagggtcacagcagtctcagcttagaacttgaatgctagagagagaaactgagggaaaaaacccagttgtaagcattaagccaatatagcaatggatgaggaagaatgatcttaggccaccattcatgcctgcatacagtgatacaataatatcttagtgttgggggttgaagctgctgatggaccatttgctcaagttaggattgaccaaggagatggacaaggtgagggactcagagataactgcagagccgaggcacagagagcagaggctggctactgagccagtgctaatagaagacttttctaaatgggtaacatagtcaattataagtgacactgaacaacatgtccatttcgtcatggttatggcaggccctgtgctagctgttggggtgacaatgatgaggaggacatatatgcattttagagtcaggaggaagcgacagatatttcaacatgtggttacaatacagtgtggtaagaattgcgataaggaaacagatgggggactgacagggatgtacaaggaccttctgaaatagatgtaagaggccaaggctccccaaagagggaggaggggagagtgaactgaatagaaggaacaatacgtgtaagggcctgggagaactggaactcactggaacacagagcactaggtggggaaagataaaaggggttgcagagggagtcagggaccatatcataaaggctcttaactgcagagatggaaagctcttagagccacctcagggcattcacacttactgttccctcatcctggaacacgctttcctagtagccacagggtccactccctcacctccttcagatctcttgctcaaatgtcacctgctcaaagagattgtccctgatcaccctccataaatagctgtcccactctccatctctccaaccggctctattcttcacagcacttattcccacatggttcttccactagaccataactactagaaagtaactagaatgctgtttttggtttttgtttttgtttctgttttagacatggtctcattctgtcgcccacagcccactgcagcctccaactcctgggctcaaggatcttcctgccacagtctccagagcagctaggactacaggggtgtgtcaccacgcctggctacttttttcaatttttttttttttttttagacagagtcttgctctgtcgccaggctggggtgcagtgccgtgatcttggctcactgcaacctccacctcctggggtcaagcgattctcctgcctcagcctcccgagtagctaggattacaggcgcacgcccggctaatttttgtatttttagtagagatggggtttcaccgtgttggccaggatggtctcgatctcttgacctcatgatctgtctgcctcggcctctcaaagtgctgagattacaggcatgagccaccacgcctggctgtttttcaatttttttctttttttgtagagaggtgtcttgctatgttggccaggctgggactagaatgtttttgtttgctcttttagccctagcacacagtacttggtacatagtaggtcctcaataaatatttattgaatgaagggacagaaataaacatttgatgtttaggaggtaggacccatagttctttggtaaaagactagtgtgctgtggctcacgcctgtaatcccagcactttatgaggccaaggcagatgtatcacttgagcctaggagttcaagaccagccctagcaacacagcgagacttcgtctccacaaaagattaaaaaagaaaaattagccaggcgtggtggcaaacgcctgtagtcccagctactcaggaggctgaggtgggaggatcacttgagcccagaagttcaaggctgcagtgagccatggctgagagcgagaccctgtctcaaaaaaaaaccaaccaaacaaacaaacaaaaaaggaaactggatgtaggcagtgaaggagagggaagagtcacaggtcatatgaggctgctggtttggacaactgggtagctgatggtgccataccctgacatagcacaggcatattgagctcactattgtctgagataaggcattgcactccaggagtgtgaggtataggaagtcctgggagggggaagggctgcctgtccaacactctgaccgtacggaatatgcctgaattctgccatttcttagctttagggctctggatacttgtaggcactgccagagctctgcctcttgccacccccattgccacttctaacctcaccaccacctctgctgtctcccgctctcttccctcttctgtgcacattttgttctccttggtattctctgctctctcctttcactgccaccactccgggacttctcagctttggcttctcaggaacccaaatcctgccttctggccggcagaccagtcacaccatattgtctatgatctctacgtctttggctcagcccagctattttggtctctgcttgcactctgagatttttcttactttcctctgggtttacacctctttctgcacttaaagggtgacagacatcttaagagttggttaactgagctgtaaaggttagacttctgacgtggctgatgattgattaatggatctaggtgtaaagagatgaaagcaaggtcattctgtctaaaagtgaatgggacttttttccttcagtgggttttatcttttttttcaaatggaacaatggaacctattgcctcatcaagcaaggaagtcaaatcacaatagattgaatttcagcaagtgttttttgaaacctctaatagataccaggaattgtgcttggtgctttcagtgtattactaaatcttcccaagatgaagtcccttccttgatatccaggcagtgcctcctagatcaactgttcattcattaactcagtgattatttcttgtgtcagacactgtgctaaatactataacagatacaaaaataaatatgacaccatctctgttctccaggaactcaatctagtgggaaaaacagacatatccatgactgggtatgatacattgtggtagctgtgtgtacaaagtactgcaggagtaaagagggcacccactagctctgacagggagagctaaggaagatttaacaaaggaggtgacattgagctagaccttgaaggatgagtaggagtttgctaatgtgcataaagagaatgggttttggaggcagcagaaacagcctggaactgtgaagggcagagagtgctttggacttgctatgactggaatgtagaacacttgctctagcctcaggagttctgcccagagaaggcagaggattgtctgggtcacagagaaagtgagtggcagagacaggattaagcagcatgaattagaattgtccgaccccgatccatcttccttagcctctaatacacacacacagacacacagacacacacacacataatgctagtccaacttcttgtcctgtcccctggcttagatgctgtcattcgactgcccccaccccatttgcccttctaggagtgtgcccctaggctctgaggattgtccccagagaacctgggagagaaacagagcctagagaatattagagaatacactaatactggcccacccccaccatgtgtctgatccatcccagtgtttagttctggcctagacatttgcctatgacctgagtccatagatcctaactcctgatgtggccacgatagactctgtgatgttcgtaatggatttggatgggctgtgagatgctccttgcttgagtatcccagaaaacgagctgcgtaaaccaggttgccagctttttactgaggaggagctacttttaattcccagagcactggaacgctagagtgggcttatgtagaagaccccctgttcctcacttcctaccataagcaggaatgaaaatttttaaattccatgctagcttcgaggtggatgctcaaaaaatactccattggctgactggcttgtgagtagttatctgttcagaggtccctagctatttcccaaatggtgtaattcatcttagtcaaatttttagagaaccagtagagtccgttggcagatagggaggcactggatatattttaggtttgtaccacacctcttttggggatgtcttgaggcagcttacatattaaaacataatgtcttgtggctctacgcctgtaatcccagcacttacggaggccaaggcgggtggatcacctgagcccaggagttcaagaccagcctggccaaaatggtgaaaccccgtccctactaaaaatacaaaaattacctgggcatggtggcacatgcctgtaatcccagctacttgggaggctgagacaggagaattgcttgaacctgggaggcagagattgcagtgagccgagatcgtaccactgcactccagcctgggcaacagagtgagactccatctcaaaaaataaaataaaataaaaattaaatttaaaaaaagcccataatgtctttatgtaagtcttttaaggatgaaacataaaacttggtggtctgaaggatgaaaaaagtaatggttacttccaaacatccccatgctcaacaaataagctataaatttggctgaaaaattcctgggagaaagacaaaaagggaaacgcattgggttatccagtgttccttttcttataccttaaagtatacagaatatcctatagggaaaacattttcctcaagctaaagcctaatagaaagtaattgtgtttggtcctaagaaagttgagtgagaaggtgaagggtatgtaattccatttagccgtcgtttctccgtatccactcagcaccaggccctatgcagtgtccccagtcttctgggagatgctgtcatgtccataagtcacccaagagaaagaagacttgaccgcaaaagatgaactgccctccataggacccacaagaactggctcttggtccaaggagcacatgggagggcaggatggctagatttcaaaaagcaagagtcaaatggccaggcacggtggctcatgcctgtaatcccagcactttgggaggccaaggcaggtgtatcacttgaggtcaggagttcaagaccagcctggccaacatggtgaaaccccatctctactaaaaatacaaaaattagccaggcagtagtggcatgtgcctgtaatcccagctacttgggaggctgaggcagaagaatcacttgaacctcgggggtgaaggttgcagtgagccgagatcacaccactgcactccagcctgggcaagagagcaagacttcatctcaaaaaaagaaaaaaaaaatctgctcagaatgtgctatgctctcccacatttccaggcaattgcacatgctgtatacttcaaggcttagcttaaatctcatctctatctggaagccgtccctgagttcccctttctctgtggtgctctgctccccaccatggataagacacccttcttttgttctcccatagaactctatgcacacttgctttttagcattgtatttttattgtgggtttacttgtcagtctctgagttccttattcatctttattttttcagagcctcgcacagtgcctagcctgtagtaggtgctcagttaatgcttgttgaatgcacataatgagcaactactgtatccagcactgtcctgggcactggatgattaagctacagccccttccctcgaggatgttaaagtcccagcactttgggaggaggagaaggaggaggaggaggaggagactcttacataatgattccagcccaatcttataatatctataataggggatttggggagcacagaagaggaagaaaataacttagcctgacacgtcaggaaagtcttccagaggtagtaatttatgggctgaaccttaaaatataatttgttttttgccaaactgagaaaaatattaggcagaggaaaaaacatgtattaatacaaaggcaggaaagagaatcaatatttagggaactgcaagtattgatattctgtgccatcatttggaatggaaagtatgtttcagatccaattgtgagagacagaaagttgttactttattgtgtatgtttcaaggctttattattccaacaatttttcttgtatcatcagatggattttatcacaaggcagtaaagatgttatagtcacctttggtgaagcaaataataacttatttatagtttctggctggctgccttctgaaaaactgtttcatttgacttataataaaagacacatccataattagcctgttcatatagacacatgaaacaaaagctatagctaggaggggaataatgccatttccccaggctcttttcccttcattggcttacttggcattcaggataatcctctgaggatgggaaacagggttatctagattcgagcccagcatgtagctcctggaagtgcttgtgggctcaacaaatacacggatgttttcctcattttccagctgatgccacacatatttcctggtactcttgtgtccctgggtctccatcccctcatgcttttgggtgggaataatttttttgtttgttttttgagacagagttttgctcttgttgccccagctcgagtgtaatggcgtgatctcagctcactgcaacctccgcctcctgggttcaagtgattctcctgcctcagcctcccgagtagctgagattacaggcacccgtcaccatgcccggctaatttttgtattttagtagagacggggtttcaccatgttggtcaggctggtctcgaactcctgacctcaggtgatccacccaccttggccttccaaagtgctgagattacaggcatgagccaccgcgcccagccgggaataatctttacttgctatccttcagagtcattacttgttggagctccttcacccaagcttctttcagattctcttgcctttttaatgtttttctcctctttaaaaaaatcactccatgcataaaacttagaaaacaggaaagcacagaaaagaagtgcctcgtgatactataaccaaaggatactcagtcaattcttttttatttaaaaaaaaaagttatgacatcatttcagactttcagaaacattttcgagaataggacaatttctttaaatatttatttatttacttatttattttagagatgagatctcactctgtggcccagcctggagtacagtggcatgatcatgtctcactacagcctcttactcccgggctcaagcgatcctcctgcctcagcctcccaagtagctaggaccatgggtgcacaccagcatgcacagctaatgtttaacttttttgtagagatggggtcttgatatgtggcccaggctggtctcaaactcttggcttcaagccatcctttcacctcagcctcttaaagcactgggattacaggcatgagccaccacacccagccaataaagaattcttgaatgctcctcacccaaaactgttaacatctaactatacttactttatctctctctcttctctctgtctctgtctgtctctctctttatatatataggcatatatgtatatttcttttttttttttaagacagagtcttgctctgtcacccaggctggagggcagttgtgcaatcttggctcagtgcagcctctgcctcccaggtccgagtgattctcctgccttagcctcctgagtagctgggattacaggtgtgcaccaccacgactggctaatttttgtatttttagtagagacgaggtttcatcatattggccaagctggtctcgaactcctgacctcaagtgatcctcccgcctaggcctcccaaagtgctgggattttaggcgcgaaccaccacgcctggccatatatgtatatttctgaacccatttaagaataatttgctagccaattgtcacctgggccaaaaaaaaaaaaaaaagaataagttgcagatattatgcacccttatgtcagcctcagtccttcagtgtgtatttcctaaaaatcacatattctcctacatattaatttttatatatgcctttctagattttttctatgcacacatgatttatttatatttaaataagatcatgcattgttttatttatatttatttatagtgccttgcttttttggggggtagcaatacatattgtatataatctcctgccaataaatattctacaacatgattcttcatcaggctttgacagcagacacggtggatttctgggtggcacaacattttcaaaataccactctgcatcacggaatcagccgtgctggccgggcgcggtggctcacgcctgtaatcccacaactttgggaggctgaggcgggcggatcatgaggtcaggagatcgagaccatcctgggtaacatagtgaaaccctgtctctactaaaaaaaaaaaaaaaaatacaaaaaattttacaaaaattagctaggcatggtggcgtgtgcctgtaatcccagctattcgggaggctgaggcaggagaatcacttgaaccccggaggcggaggttgcagtgagctgagattgtgtcactgcactccagcctggcgacaaagctggactccgtctcaaaaaataaaaaagaattaaccatgctgtgcttttccaggtctagtccaatatcagtggaaagcactgaataaatgagtaaagaggcagggcaatggaaaactctgaattcaaatttaatctttattctgtggccagtagaaatccaatgaaatgtttctagcaggaggggacaccaataaaagctgctctctggagatgaatttgacagtgtctgcaggatggggtgaaggaaaaagaactcagagcatgagtccaggagtcactggggtcaaatgatccctcgtgttcaaggcacatctctgcccaggtagaacagagcctttcccagcataacgcatctttttctttcccgtgtctttcagaactggttaaagtcctatggctatctgcttccctatgactcacgggcatctgcgctgcactcagcgaaggccttgcagtcggcagtctccactatgcagcagttttacgggatcccggtcaccggtgtgttggatcagacaacgatcgagtaagatttccataggacattgtgcctttgaactttctggacttacatttgggttcacatttgtcatggcctgtgtacaccccatgcccatcctcccttcctatcttttattcctgcagtgccatcctgggaaagaatatctcgatgtgagttgggggtgtgctgggatgggagtccagccctcccattaacattccatgtgaccttggagacaagttgcttaacccttctggacctcagtttccttatcagtacagtgaggggttgggttatagatggggtcttaaatcccctctggctcgaataatttatctatgggtcaccctctggagttccctgcaacgtgcatgtctcacagaatacagaaaacgcttgaatgataatgagttggctccactttttccatttaccaaacatgtgctgggtgcctgcatgtgcctgtcatccggccctccagaggctcaccatttagtgacaaatacagtcatctagccacaccagtctagagctcagaaggaaacaatgagttttggggagacacttaggaggtagtaacacttaggaggtagaaaaaagccatgaggatggtcccaatcactcaaggagaatgtaaagattcacgggcagggtgctggggatggaaccccacaaagccagccgagaaggggcagccggagggcaagaagcctgacgtgatgatgtgatgcaatgtcatgatgccacatggtgtggggtggtcagtggggccagccactccagagccctccaacaggagcatggctgaaagttgtctgctgggtttagtgacaaagagcttgttgttaacctcagcagaatggtggagatgaagtcagactgaagtggggagaagcggaggtgaggagaagaggtggcaagtggagggaagacattcaagaagcttgacagggaggtggggagaaatgggtagcagctagaggatgaagttttgtttgtctaagataggagagagttgaacagccttaaacttgcttaagaaagctatgagagttgtttaagaaaagccattcacatcattaaagcatggaaaagaacaggagtgagtttcctaaggaggtgggaagggaggggaacctgaggcaggtggaagatgctagcagggctgggtgaggatccaagggagttggtggggggaggaacaggaaatgcacccagttgtggatcaaggatcaatttgacgtaagtcactcctggacagaatcatctctctgggtctcagtgtgttcatttgcaaaggagggtgttggattatggctctaaattctagattcccccccccttttttttttttttgatgagatgaagtctcgatctgtcacccaggctggagggcagtggcgtgatctcggttcactgcaaccactgcctccagggttcaagcgattctcctgcctcagcctcccaagtagctaagattacaggcatgtaccaccatgctggctaattttttttgtatttttagtagagatggggtttcaccatgttggccaggctggtctcgaactcctgacctcaggtgatcggcccacctcggcctcccagagtgctaggattacaggcgtgagccaccgtgcccagcctagattccattattttaagcatctaagcttttaaaacttggcaagtctggggttttaggatcctaaaatcctgtgtgaacatttcccattcctaggattctctgattatgagtgtgaacttcttctcctgtgctgttgtgaatacagtggactccttggccccgtggtctccagagtgggctggttaaagagagcccagccgcctttcaaagcggaggttattttgagggctttgcacaggcctcatggcagtgcatcctggggcagaagcactggtgtctctgctgcggcaccacctggccttgggttttactctgttccaaaaagccccaggcctgttggatggcgctcagagagtggcaggtggatggtgaaaggaggaggcagcgggaatgatccgagggaaaaggatggcatttcccacttgcagttctgcccacacctccttgtagaaggcgggggagttgtggtctggaagcaggggaaggaggaagccagttgcacttattaatccaagacctgagatggggagtgttcagggtagaatttagagccccaagatgcagctccagctctgtgaccttgggcaatggctgcctttctctgagcctgtttcctcccctaggtgcctttgggtctaactcagtcagaggtggttcttggttcccttcccagggactgttaattaaaggaagctagattagccatttaaagtcctatgtttgagtgtcgccttgggaaatgtcacacatttattcattcactcattcatttggtcaacaacatagttcctctagctcagctttgtgctaagcactgacaggaaaaaataaaagctccaggctttgttaaattgcattaatgaatagttcattttttcattcaactaagttccagtcctgccttgctgatttctgtgttttgcaaggtactggatttatctgtggattgtttccctcatctgtgaaatgggaataataatttcttttttttttttttgagacggagtctcgctctgtcgcccaggttggagtgcagtggcgggatctcggctcactgcaagctccacctcctgggttcaagccattctcctgcctcagcctcccaagtagctgggactacaggggcccgccaccacgcccggctaattttttttttttattttttagtacagacggggtttcaccatgttagccaggatggtctcgatctcctgacctcgtgatccgcccgcctcggcctcccaaagtgctgggattacaggtgtgagccaccgtgcctggcccgggaataataatttctgttacctcacagtgttgttttgagaatcaaacttttttattttatttatttatttatctatttattgagacaaggtctgactcccctcacccaagtgtactggtgtgatcttggctcactgtagcctcaactttccaagctcaggtgatcctcccacctcagcctccctagtagctgggactacaggcacatgccaccatgcctggctaattttttgtatctttagtagagatagggttttgccatgttgcccaggctggtcacaatcttctaggctcaagcaatctcctgcctcagcttcccaaagtgctaggattataggtgttagctactgcacctggccaagaattaaacattttaaaagaatgtgctgggcgcagtggctcatgtctgtagtcccagcactttgggaggccaaggtgggcagatcacctgaggctaggagttcaagaccagcttggccaacatagtgaaaccctgtctgtactaaaagtacaaaaattagccaagcgtggtggtgcgcgcctgtaatcccagctactactcaggaggttgaggcaggagaattgcttgaacttgggaggcagaggttgcagtgagctgagatggcaccactacactccagcctgggcaacagagcgagactctgtctcaaaaaaaaaaaaagaaagaaagaaagagaaatacctgaaactgggtaatttataaagaaaagaggtttagttggctcagggttccacaggctttacaggaagcatggctggggacgcctcaggaaactttcaatcgtagtagaaggcaaaggggaaacaagcacatcatcatatggcaggagcagggggaagagtgagaagggggaggtgctccacaccattaaacaaccagatctcatgagaactcactcactatcagcagaacagcaagggggaagtctgcctgcatggcccaatcacctcccaccaggccccgcctccaacagagacacaaatcaaaacatatcacctggtaacaaacagatatcaggatttacgtaatttcaggcactgggctaccttcttttgaggatacaatgatgaataggacatagttcctgtcctcaatttaccatttattagaggaaataaaccaataaattttaaatcacaacacaatataataagtgctgcagagaattatgttccacatcccacagttgttaagccacttcttttttttttttttttcctgaaacggcatttcactcttcttgcccaggctggagcacaatggcacaatcttggttcactgcaacctccgcctcacgggttcaagcaagtcccctgcctcggcctgctgagtagctgggattacaagtgtgaaccactgcagctggctaatttttttttttgtatttttagtacagatggggtttcaccgtgttggccaggctggtctcgaactcctgacctcagataatccacccgcctcagcctcccaaagtgctgggattacaggcgtgagccaccgtgcccagctgaagagtttgaattttattctcagtgtttggggaagtcgctggaggcttttaaccagggcatcctgtaatctcattgcatttacagagcattttcacatgtacttcctccttgaagacgcacctccacctaagaccaagaactagagttctcatgttgcagaggaggaaactgaggttcatattggttcagccacttgcctgggggtcctatgactagtggtggagctggagcttatcaagcccatatattctgattctcagtctttatacagctatttcctcatctatgattgtgagtgcatgaattaatgaatcaatcaatcatgttcttgttggggtccatccaagccagggtcccagagtgtagcttgaggatgcacattgctttccagactggagctggggaataggcagtcccttcctaaagtgttcagtgaccacagtgcatatgcgtgtgtgtgtgtcctctctctgcccaggtggatgaagaaaccccgatgtggtgtccctgatcacccccacttaagccgtaggcggagaaacaagcgctatgccctgactggacagaagtggaggcaaaaacacatcacctacaggtgcttcgactctccctcttcctccctgcctttggctccaccctcactctgtttttcctggcctgagtttcaaaggctcacaatgtaggggggcctggggatcaggcttacaacataggccaagagccaggcatgtgggcattggcactaggtgctgagagcccataaccttgtcctccttgtggcttccacaggatgctgtgactccaacctcaggtttatttggtcctctgggggctcttagttgtcttctgtttagatgcctatagtttttaggttacaggaagtggggtatgaatggtttggtaactttcagctgtgaaaaagaatcgtggcttgcagtgagctatatcatgccactgcactccagcctgcgtgacagagtgagactctgtctccaaaacaaaacaaatgaaacaaaaaccacaaaacaaaacaaacaaaaccatggcttaattcagtctccttatcactgcctgccaaaccccattccctctgatctggatcctcccaccccaaaatccacctgatggacttcacctgagattcccaacgcagagttccagttgtttcttaaggagtataaagaactgggacctgaatcataatagtgtcatctttgactgtctggaggaaccaagggcagagcaggatccatctccaagtcagatcagtggcccaagaactagatgatggagcccatcacagcagactgaagcaccggagtgaggctggggcaagggccaggcattgagcaggctcaggtgggggtggggcaaggggcaggcactggacaggctcaggtggggctggggcaagggccaggcatgggcaggctcaggtggggctggggcaagggccaggcatgggcaggctcaggtggggctggggcaagggcccggcatgggcaggctcaggtggggctggggcaagggccaggcatgggcaggctcaggtggggctggggcaagggccaggcatgggcaggctcaggtggggctggggcaagggccaggcatgggcaggctcaggtggggctggggcaagggccaggcatgggcaggctcaggtggggctggggcaagggccaggcatgggcaggctcgggtgggtgctggctggcacttctcaaggctctgctgtcatctcaggtggatccctttggtgcagaggcaagatctaagacagagatcctcaagagttgaactaagggctcccctgctgacaagcactccctacagaacgggactttttttttttttttttttttttcagaaatctgacaagagaaggaaagttagggttgaactaagggctcttctgctgataagctgtcccttcagaacgggattttttttttccagaaatctgacaagagaaggaaacttaagaatctaggttagaaactgaatagactcttgggtctcttgaaggggtagagtggatcaagagaaagaagcactgggttctaacccaactctgagtaacttctatcactagacttctctgggcttcagtttccttacgtgtggagtaggtagaataatccatgccccagagggtcacagggcagggaacccacaggtagtaacgttgttttgtgaagaaccaatgcaatatgaacacagcgacgctaaacagctaaacctataatggattaaatcagataccggccagcttctaggcagacaagccaaagattggtaccaaagattttttaaagagacttttcacttaaactcctctctattatttgaatatttttataacttttataaatgaacatatttcgtattagggaaaaaaacttaaaattcagaaaatgctatctaccaatttcctttgggttttttttttttttttttgagacagagtctcactcttgttacccaggctggagtgcagtggtgcaatcttggctcactgcaacctctgcctccgggttcaagcaattatcctgcttcagcctcccgagtagctgggattacagactcacaccaccacgcctggctaatttttgtacttttagtagagacagggtttcaccatgttggtcaggctggtctcgaactcctgacctcatgtggtccgccagcctcggcctcccaaagtgctgggattacaggcgtgaaccgctgcgcccagccccaatttacttttctcaacaaactagagtggaatcctttattcgacacagctttgctggagatcaaatggaaaacactgagtaaagcaaagccatctgactgaggcagggtggggatccagagctctgttactcagcctcttcttcaatccctgaggcagctaagcagaattctagggttcaaaatcagatcactgagccacattgtctcaggtatctattttagctctgctagtctctgactctctgatcttgcctaatgatcctcccctctctcaccagcattcacaactataccccaaaagtgggtgagctagacacgcggaaagctattcgccaggctttcgatgtgtggcagaaggtgaccccactgacctttgaagaggtgccataccatgagatcaaaagtgaccggaaggaggcagacatcatgatcttttttgcttctggtttccatggcgacagctccccatttgatggagaagggggattcctggcccatgcctacttccctggcccagggattggaggagacacccactttgactccgatgagccatggacgctaggaaatgccaaccatgacggtaaggccatgaggggacaggggtcagtcttgggctgctcagttgttgggaaagaacttggaggacatcctagatgagtttcctgctttctagagcctcttgtccaagaactaagaccgtaagagggtgggaactgtgatttctgataatattcaacgttcaatccaccagggccagggccatggagatgagtcagatcacttagaagatagtccggttggcaggagaaaagtaaggttaggccagtaagaagataaagtaatggaccagaggctgaagaaaaagtttaaaaggggccaggcacaatggctcacgcctgtaatcccagtactttgggaggccaaggcaggtggatcacctgaggtcaggagttcaagaccagcctggccaacatggtgaaaccctgtctccactaaaaatacaaaaattatctgggcgtggtggcgggtgcctgtaatcccagctactcaggaggctgaggcatgagaatcgcttgaacccagaaggcagaggttgcagtgagccgagatcgcaccattgtactccagcccaggcgacaagagtgaaactccatctcaaaaaaaaaaaaagttaaaaggcattaaagctgaaagaggggtctgaaagtagtaggctctggcctgaatgatgagggctccaaaagccatcttatgaatgacacgactggctctctcctttgtcaccctcacaggtgagtagcaggccctgaaattattctggcatccttggataatttaccctgcaccactatggttcaatgaatatttatggaggcagagtcaataccgtgcagcaatagtaatgataccctgcaggttgccaaaaaattcatcatcaatatttactcacaaggcacatgcttagtatgtaggcaagtgtacattattacacccatttttaagatgaagagttggggctcaactggcatagctgaaaggtgacaatgcaggtatcaagccctggttcaactactggctatgtgataccctcggtctcctcgtctgcaaagtgaggggctggattaggtgatcgctaagggcccttccaactctaatgaacatgatacaaagtcttgcaaagaccagggggagctgaatgtttgaaaaaaatggcatgatctctgtcccctggcagtccagagtcagtctagcaggggagttaggtgtgcacgtaagtaaccctgtcatagacagactctacccaaggctgtagcagaggcacaaagaaatatgtaggagtttggaggaaagagggacagaggagtgtggcttttggattataagagatgataattagtgggtatgctggtgttctgaggcccgtgccaagtgcttgccacccattatgtgtggaaactattatatctattaatacattataatgcataattaaatttatgtattaagcaatatataatgttaaattattattataggtaaatattgctatcttcattttacagataggtaaactgagatatagagaaacattaagtcacctacctaaggtcccacagttggtgaatggtgaaataaggctttgaatctgggcattatggccctggagcccatgctgtcagccatcatgctaagcttccatggttctcaaactgtagggcacagcagaatcacctgggaaccatttttaagaattcagattccaggccaggcacggtggatcacacctgtaatcccagcactttgggaggccgaggcaggtggatcacctgaggtcgggagttcaagaccagcctggccaacatggtgaaacccatctctacgaaaaacacaaaaattagccaggcatgttggcaggtgcctgtaatcctagctactctggaggctgaggcaggagaatcccttgaacccgggaggcggaggttacagtgagccgagatcatgccactgcactccagcctgggcaacagagattccgtctcaaaaaaaaaaaaaaaaaaaaaaaaaagactgcagattccaggaccctaacctcttgtcattctgattctctgggtccggggtagggcctgggaatctgcaagtggtctaatacattcctggggccttctgatgcaggtgttccatcaccatgagaaacgctatcttaatacctagagttttcctacctggcctgatcataagaaccaatgggggttcttgttataaacggggattcccaggcccttcccacagaaatcctgactcttgagctcaaacaagcttgggaaacaccgagcatccttttttcctgccctgcggctgctccaggctgagagcagactctcaaagctggtttggtgtctatagttggggccatgtttggtgtctatagttggggatcacctccttgagaacactttatatcatcgcatggattagggattggcagctctggggttatctgtcaaaggctggaccaggaggtggtttggccaaggctcagcctaggcaaagtcatgaacctgttaaattgttctttgtcctcttctttcttcagatttttgtcctctttcctattgaactccgtttcctttgccctggtatctctcccgtatgtcctgcatgtattcctggctgagtacctgttctttatctcattcttatttttggatcggtgtcaacgaatggctgtctgtgctaacagataagatgtgaggagaagagaactaatatttttgaggccctgttatgtgccaggcactgttagctgatagggttttagttatattcctgatagaggcaaatgaatgtccaaagagttgtccagaggcaacgggaagacactcccactcctctgccctccccttctgcccagcactgggggtgtgcacttcccacacctgctccttgcttttgcagaacttgttggacccagcccccaaatcccaagagccggtggtatgtgtgggaaggaccggggacctgtggatgggcaccatcccagcacctctcccatctgtccaaccctaaccttcatgaaagactgccaattctgatagaaattccaagattgctaatgttttctttggataagaatcaggactttgctctgctctggaaaaccaagcaggaactgtccagatgcagctcaggaccacagcaatcgactcctgaactggaatgcagtgaaggcaggttttgggtgagaggcaaggaaccaaaatttattgagcatccatatattatctcgtttaatttccacatagactcagcaaaggggtggagtttcctgggaactttttgaacttattagcttacttcttttttctaaactctcattatggaaaatttcaaactcacaaaagtaggaagaatgcttctatgatctcccagatacccaccacctgcctcagcaattatcaacgttgtggcattcctatttatctacctttttttggctgatgtattttaaagaaaatctcaggcattctaacatttcacctttaaatactttagtatatacctctaacagataaaggctaatttttaacataagcacacaatcattatcaagcccaacaaaattaacaataattttttaaaatctaatacccagttcgagttcactttcccaaagtaccttggaaatgtcttttacagttgtttgcttgaatcaggatccaaacaagatccacacacacatggctgacatgtctcttaaagccctttttatttaaaacacccccgtcctacacacacgtttccctccatatatttgttgaagaaactgggtcaggtgtcccgagtataatcatttggcgtgactagaatcaagtttacttttaatacgtctctcttgcccataattcctgaatgttgttcattagatttacaggctgactagattcaagttcaatttttttggcaagaatacttcctaggtggtgctggtacttcctattcaccatattagcaaatacatatgatgcagactgtcccacttttagtgatgttgaggtcgagcatttgcttcaggttgtgtcagcctgacccaaccattatacaattcacctggagaacttaaaaaaaaaaaacaacaaaaaagattgcctacgtcccaaaccaaacctcctgaatcagaatatcttccccacctcctccatgtgtttaaaaggctccccgggccaggtgcgatgggagcactggagtaatcccagcactttgggaggccgagggggggcagatcacctgaggtcaggagttcgagaccagcctggccaacatggcaaaaccccgtctctactaaaaatacaaaaattagccgggtgtggtggcacatgcctgtaatcccagctactcgggaggctgaggcaggagaatggcttgaacccgggaggcggaggttcaagtgagccgagattgcaccactacactccaacctgggtgacagagtgagatcctgtctcaaaaataaaaaagaaagaaaatactttttaaaaaaataggaaattcacccctttggaaagtggcagagccaggtgtgaccccaggactccgcatttttaagtcaccacaggtggttctgctgcaggtggtccgagtatttcccttggtaaaatacggtgcttttggcgctgttccattccgggggctgtcacctggttcttcaacacaaagcttgtcctcaaggaacccacagtcctggggcagcgagcatgtgcactagtggcaatcacgtggggaggaagcggtcagtgccataaaggcagttcagggaaactgctgggagggcacagcagaaggagcactcactgccagctgggaagtcatggaaggcttcctggaagacaggcatggagctgaactttgaaggaatcaggttattccaggggaaggggcagcactggcagaagaacagaggcaaagggaaatgctatcacctttcgtggggctgggggagttaatgagatgggaacgaccaaatatggagatcctaaaagaaagaaatgaggcagagacaaggtccacttgagtagccgagtagactgctggggacttgctcggaggcccagggacttacaggaacacaccctatcaggggtgctggtgctcacacacagctcaacaggaccctgctaatgaagggtaatacttctgtaccaggagctggtatcagcgcattacacaccctgccccatgaatcttcacccacatccctatgacgaaggtgccattgttccttctatcttccagaggaagaatttaaaatgtcacactgctaggacatggcagagctgggattcaaaaccaggcagtctggctcccagagactgcattcctgaccactctgcttccctgccgctcaccctcttgaagagtgaagaccctagcagcctcctgcccatggagcatggggtcctcatagcaggcctctcctcctcatacctctgccttcacctcacaagctcagggagtcctcctgcccctgccctgctccctctgtctccccctcagggctctcttgggtttctgtgcagcaggatactggctccctcgctcttcccttccttttggttcctggacccaaaccacaggcctctttcctttaaggggtcactcctgttctctgcagacccagaacaggggttaaaagagcaagagacaaggctgcggacaaaggttttgagtctcccacagtgctcagagccgtgttccctggttcccagctgagctccctgtggacagcccctggggaagagcctgctcaggagacagaggccctgaacagcttgtcccaggtcatagaatagcccaggagcacagccaggactggaccccaggaagcagagctgccttccgctggctctaccagtttgtttgggatggagctcagcgatgagctcacccttccctgctgccagaggggccaggacctgagtaaggagctgggggcggcctggccctctcatgccagcagaaggccagccccaggcttttggccaaccttgcactgatcttgcccatcccccttcctttccgttgctcaaaggtggcttcacagaagacactggcggtgtcagtagtgtgggaggcatgtactgcccgtggcctgggtctgccccatggggttcttctctcttccagagacctaagccaggaaggccaaacaatccccacccccatgtgtccctaggccagtgacgctggggccagagtgggcagtaggactctagaccacctcctaggttcctggcagcctccctggacttacaggtggcaggaatgggccgagccatgccttagggccagaagataagaggcagggctcaaggggctacaaatgccagaggtcaaggcaagcaagggtctgacactgggcagacaggagtcaggactggtgatccacagcctacctgactccctaccccctgcattttctccccaaagctgcggttacttcatccccctaagttcaggcctccttgtcctgtcctaggcacaatacagaagcccaggggagttggctttcagaggatctggttgctggcgctccactggcctcgtgcttcctttctggtcaatgggcttcctccagtaaccaagcttctatcttacataggattacaacagctgccattctgtgtcataccacgcacttcacgtgtatcttattcaacctcacacaacccggtgaggtaggtctgatgcccccagtttacaagtgaggacattgaggcttaggggtagccctgctggccatattcacaaactggcagggggaatgaaggtaatctgtcctactcaggagcccaagctcgtaaccaccgtgccatggagctgcctcagttccaccctcaggatcctgtgtcccacttccaggacctggagtgtgttttcacctacacttgaatccctgcctcaatcttagccaacagttccctgcttccacaaccaaggtcctgcagagagctgcccacgcccgggccccacctgccctgcccggggtctcctgaagctgactgccagtttgccaggacttgctctctttgtccccactccctccctccacctcagggcatcctttttttttttttttttttttttgagatggagtctcactctgttgcccaagctggagtgcagtggcgcgatcttggctcactgcaacctccacctcccaggatcaagcgattctcctgcctctacctccggagtagctggtactataggcgcaggccaccatatctggctaatttttggtatttttagtagagatggggtttcaccatgttggccaagctggtctcgaactcctgacctcaagtgatccaccccgatcagcctcccaaagtgctgggattacaggcgtgagccaccacgcccagccagctcagggccttttcatctcttgtaggggtgggttgcccctccacacctgtgggtgtttctcgtaaggtggaatgagagacttaggaaagaaaaagacacagagacaaagtatagagaaagaaataaggggacccagggaaccagcgctcaccatatggaggatcccgccagcctctgagttcccttagtatttattcatcatttgtgggtgtttctcgaagagggggatgtgtcagggtcacaagacaattgtggggagagggtcagcagacaaacacgtgaacaaaggtctttgcatcatagagaatgtaaaggattaagtgctgtgcttttagatatgcatacacataaacatctcaatgctttacaaaaccgtattgctgcccgcaggtcccacctccagccctaaggcggtttttccctatctcagtagatggagcatacaaccgggttttataccgagacattccattgcccagggacgggcaggagacagatgccttcctcttgtctcaactgcaagaggcattccttcctcttttactaatcctcctcagcacagaccctttacgggtgtcgggctgggggacagtcaggtctttcccttcccacgaggccatatttcagactatcacatggggagaaaccttggacaatacctggctttcctaggcagaggtccctgcggccttccgcagtttttgtgtccctgggtacttgagattagggagtggtgatgactcttaaggagcatgctgccttcaagcatctgtttaacaaagcacatcttgcaccgcccttaatccatttaactctgagttgacacagcacatgtttcagagagcacagggttgggggtaaggttatagattaacagaatctcaaggcagaagaatttttcttagtacataacaaaatggagtctcctatgtctacttctttctgcacagacacagtaacaatctgatctctcttgcttttccccacaatctctcgcctggaccccagcatccaaacagatccccctgccccaggtcttgttccctctaatcctccctcaactgcagccagagtgatttaattgtatcaccacccccactcctacttaaaccccccactagccaagaagctgatccaaattcctttgtatggcattaagcgccctgctttccagcctggctgacctcatctctctccggccctcccctcctgctttgttccagagccaggtggaatgaaactgcctgtctctggactgtgtttattgcattccatccgccaggaatgccacccccacccttcctctcctgccccctgaatccgttctcctgactaacttctgatccttcaagactgagcttcaacttcacctttgtgaagctttccctgaacatcttcctccaggtttaaatgacccctctctcctcagaatccctgctcgaccctcccagacattcttaaagcacccagagccctctgcctcacttgtcactctctctctccttgtccctgctctgcagagaggcttgggaggcaggggttgtgcctgatttctctgtatgtccctggtgtccagcacggggcctggcacagggcccgtgctcggtgtttgctgaggtaatgggttggctgaccgactcatatctaagcaggtgccctgggcacctccccacactcctctccacagggaacgacctcttcctggtggctgtgcatgagctgggccacgcgctgggactggagcactccagcgaccccagcgccatcatggcgcccttctaccagtacatggagacgcacaacttcaagctgccccaggacgatctccagggcatccagaagatctatggtgtgtggcagggagaggggggactgctccttcctcggggctgggctgtgactgcctacctgtcatggggcaggggacgagggagggggacgttgctatcatcagcactgctgctgtttctctgtgtgtgacctttacagacttccaatggctttgcctggccagagggcaaggcttcccctggcacacctgggaaacctaggggagggtctgagctgtaactgagagggacaaaagtgaggtgagggccacccattccctctcctttacccctccccttccacactcttccccgtcccttcatgcttctctccctccctcccacaccagatggtgactgagtgctcccatagattccacctctagccaggcaggttcacacatctgcaggagtaacggtgatacagcgtgatggggactataaccagagctttgttctttaaaaagaaaaaacgagggccaggcgtggtggctcttgcctgaaatcccagcactttgggaggctgaggcaggcaggtcacttgaggtcaggagtttgagaccagtctggccaacatggtgaaaccccatctctaccaaaaatattaaaacaaacaaacaaaaaaattagccaggtgtggtggtgggcaagtgaaatctcagctacttgggaggctgaggcaggagaatcacttgaacccaggaggcagaggttgcagtgagctgagatcgcaccactgcactccagcctgggcaacagggcgagactccgtctcaaaaaaaaaaaaaaaaaaaaaaaaaaaaaaagaaagaaaaggtgaaagatgagaagctactgctatctaggtaagatatgaaaggcctcctacacacctctctcccagttctgttcacactggtatgtgaggttcttgttctggtcaagtcaggtgagctagggagaccagtttacttgagcaaatgcttgtcaagacagcacaggcacccacagcccacaggctacggagcacagaaggagggctccctctggaggagatgacccagccagagccctggaggacaggcaggacctccacaagtaaagcagcagagaccaggtgggggctgtgggtcccagaagctattccaaaggtagaacaacaggatctgctgacagatcagacatggggtgagaggaaggagggagggtcaaggatgcccccagggtttccagcttttgtaattgtgaagcaatagggtccaccagtctgcagctcaaaattctaggctggaggccgaggcgggcgattacctgaggtcaggagttcaagtctagcctggccaacatggcaaaaccctgtctctactaaaaatacaaaaaattagcctggcatggtggtgcacgcctataatcccagctacttgggaggctgaggcaggagaatcacttgaacccgggaggcggaggttgcagtgagctgagatcacaccactgcactccagcctaggcgacagagtgagactccgtctcaaaaaaaaaaaaaatctaggctggaatacttatttgggatctttgttgttcaatacagtaaccactagtcatacactagtatgtattaaataaactactattaaataaactagtattaaatttcatagtaatgaaatttaaatttatatttattaggccgggcgcggtggctcaaacctgtaatcctagcgctttgggaggccgaggtgggaggattgcttgaggccaggagttcaagaccagcctgggcaacaaagtgagacccctgtctctacccccccaaaaatatattaaaattatcatttcagttatagttctttagtgggtctcagtcacactaagaactagtcattcatcttaagacctcagtagccatatgtggctgtggctaggggctactgtagtgaacgatgcagatatggaccatttccatcatcacagaacactctactggacagctctgatgcaggtctgtaaagccatgagcctggatgagaccacctagagcagtgattctcaacttggctgccctttggaattaccttgggattctaataaaaaaacacagacacccagccctcagctctagagatttggttttattaatagttgggtattgggcgtggtggctcacgcctgtaatcccagcactttgggaggccaaggtgggtggatcacttgaggtcaggagttcaagaccagcctggtcaacatggtgaaaccccatctctgctaaaaaaaaaaaaaaaaaaaaaaaaaaatcacctgggtgtggtggtacgtgcctgtagtcccagctacttgggaggatgaggcaggagaatcacttgaacctgggaggcagaggttgcagtgagcttagatcacgccactgcactccagcatgggggacggagcgagactccttctcaaaaaaaaaaaaaaaaaaaaaaaagttggagagctggcctggtgcttcctgaacatccagtttgaaaagctcccaaaggtgatcctaatatgcagcccaagtgaagaagcactgacctaaggatgaaaatgtagagacggaagagaagaggacccaagggcacgccagcctctagagtagggcagatgaggacacgcagccagcaaaggagactgagaaagaacagcccatgaggcaggaggacaaccaagagagtgtttccaggaaagtgtttctatgaatcttgctgctcaaaatgtagtcttcagaccagcagcatcagcatcacctgagagtgtgaaggaatgcaaactctcaggccccaccccaggccctctgagccctcatctgcattttagcaacatccccagatgatgcatgtgcttattaaagtctgagtcaagtaaccattggatgatcttggcagagcagttggagtgggtgacgggtagaagctgcactggggtgggaaagagaataaatgaagggggtgaggaagtggggccagtgcgtgtgaagggggcaaagagggtatggcctaaggaagagcgctgaccctaaggaaggacatgattgctctgtaacaggagagagaaaagagaagataccagattcggggatggaaagatgagagtcccattctaatggctattttcatccattttctcaaagactgggggagttaaactggggagagggaacaggaggctgaactgggacagacttgtctcagagctgcctgggtgatgctgagactggcaatgggaggcgggaaacggctgccccctctctaagatgcagctcctctctccaggacccccagccgagcctctggagcccacaaggccactccctacactccccgtccgcaggatccactcaccatcggagaggaaacacgagcgccagcccaggccccctcggccgcccctcggggaccggccatccacaccaggcaccaaacccaacatctgtgacggcaacttcaacacagtggccctcttccggggcgagatgtttgtctttaaggtagggccaatggattggcaccacccagctggcccctgacctttcctcctcctccccgacatcatggagctggggaaggctcctgatttgggattcgattacaatggggcctggacaggagctagcccagtggccagggcatggggtctcttcctagtgctgctgggtgaatcaactgttcccaagagggagggggaaagatgggtgatccctcacctcccctggggttaatgctgggagaaagtgctggaagctggcttctggtctgtgaccacccttcttgggacctcagtttctccatccgaaacctgggggagtcattcctctaacaaagagtgtgtgaagatccagtgagtacccggctctgaagatggtcaacttggagtaggggctaggtcagtggtggctgagtctgactccagaccctaccaaggcttgaggggctgctactggcagcagcccagggtatatcttgtcatctgtcctccatcagccatggactgacagggtggcagtctgcttgacgtgttgcaggttgggctctcggggagtgaactctgaggtggggtctggaatgcaggatttcgattagagagtactttcagaatcaacatttgtgagggggagaaggaagcaggacagggaagagggagaggttaagtggcaacagaggcccatggcagcctcagccacccccgcagggagctctggggctacggtggcctgtcactcagcctacgttgggtccaaaatatctggaacattataacccctacctcattcaatcactggatgaggaagggcatccagtgactgaggagagctctctgaagcagggaacatccccaaaggggctgacagttgaaaactgcctgctggccacactgctggccactggggcaacaagcccttctctgaaggggatctgggcagggtggctccatcacacaggatggtgaaagaggctgcctcgctccccttgtggagttctcccagcacgcactgagcactgcgcaggaatcgggcagcgtgagtcagccccagtctggcttctcactgagtggctctaggcaagtcacctggcctttcttaagactccgtatatctcagatcaacttaacagagacatgaaagtcaaaataaggtcaaaaacctggatgtgaaagtgctttgtaaaacaccttttaaaatactagcttttgtaccatcttttacaaatcatgcttcttcttctgcactcattctactttgatccaactgaaccgttcataggcaggtccgggttttatcatccccatttacacataagaaaactgaggcctggaggctgggcgcagtggctcacgccttgcaatcccaacactttgggaggccaaggagggcggatcataaggtcaggagatcaagaccatcctggctaacatggtgaaaccccatctctactaaaaatataaaaaattagccgggtgtggtggcgggcgcctgtagtcccagctactcaggaggctgaggcaggagaatagcatgaacctgggaggcggagcttgcagtgagccgagattgcgccactgcactccagcctgggtgacagagcgagactccatctaaaaaaaaaaaaaaagaaagaaaactgaggcctggaggctacaggccttgcctagactgcttgtgtaccagcccaagactgaggcaccagttacaagaggcgtttttactggactcggactatttagctgccatttactcaacatggactgtgtgccccgtactggtctgggcattttgcctagaatctctcatctgattctccattattacctgcacttgcaggtgaggcctaggtcatgcagctataaatggaggaatgtgaattcatgcccaggtctcgagggaattcccatgacttggcttccatgatcctggccctgctggatggagccagcctcatggagggcgctcggcccaggctcagtgaccaccccagcctcccactgtcccgaggaccagtctggctgatgtcagtgacgctccactgcccccatgtggccactccaggccccaacatcatcctttccggctccctcacacctccttttccacaccaggcctgtctgctgtttgtctcattgtccacccagcagcaagagtcagcaggaggctgaattgaagacagttacaggagcatcctgtcttcctcccagggctttaaaagtcagaagcagctaatggacagtctcggtggagggctgggctgttgggacctaagccccacagctgcaatcactgggttcggaggcagggcctgacacacctctctccccctctcccgcttcctcccaggatcgctggttctggcgtctgcgcaataaccgagtgcaggagggctaccccatgcagatcgagcagttctggaagggcctgcctgcccgcatcgacgcagcctatgaaagggccgatgggagatttgtcttcttcaaaggtaatgtagactgtgctgtgggacagttccctgcccaaggtcttgggacctcctttttcccatctaaactggaagaggcggggtgggaggcagatgtcctcagagggcccctctagtctaacggagacactgacctctgacaaatcaagtcagaaagtgagactgagaatctgtatgtgccgagattggtggggtgaccagcttcgtccacatgaagtagagtgtgggacaagcaattgaagaccacccagtacctcatgggaggccatcgggtcagttctgtaagaacccagagggaagaggtcactcaagctggggaggtcgggggagggtgtgggagggagctaaggtgcccaccctgtacccagcactgtgctaggttgtttcatgacagttatcttgactcgggccagacctcagatgggtgagatacagatagtgagaagcaaggaaggcattccagagggacaacggctgaataaaggagcagggctgggatgtgtacggacggccacagggcttagaaggcccacctgatggccacggaggccccgccttggaaagctgtgagaaatggcccagaaaggtcatttggaggcaaatcctgaagagccctggctgccaggccagaatgtggtcttgatccattaggccaaggctggaaattcatggaatgtttccgagcagcagagagccagagggcaggaggtgacagacatggcaggggcagggcagccatttctgaggtggttctggagcgcgccactcatgaggcccaaatgagggaggagccgtgcagctgaagggcaggggacagctgccaggagagtcagagggcctcagaagtggctgaatactcggccaggcgcagtggctcacgcccgaaatcccagcactttgggaggccaaggctggcagatcacctgaggtcaggagtttgagaccagcctgaccaacatggtgaaaccacgtctctactaaaattacaaaaactagccaagcatggtggcacgtgcctgtaatcctagctactcaggaggctgaggcaggagaatcgcttgaacccaggaagtggaggttgtggtgagctgagatcacaccattgcactccagcctgggcaacaagagccaaactccatcttaaaaaaaagaagtggctgaatactgagaggagaaggaaagagagggtcaacagtgaggctaggactccctgttggggacctgggaggcagaaggtgatgaggagggagcccctctgtggtgcagatgaggagctctggggagccagccaatgcagagctgccggtaggccgagggaggtcagggtttctggctctgctgctcaggtccagtgggagagcctcagagtcgggtgtcactggtagcaggtttggggagtggtagtgcatatgcaaagtcatgtaagtggctgagatcaccagagaggagagaggagcaagtcacatgaacaaaagagggtgggactcggagcccaggcagcagaggcaagttgtccaggatctgtgactggcctcaggcttcgtgcccttcccaactctaactgggccaaggggctgagggcatcagactgttttcacctgacaccctgaagatgggcaaacggcactgagtgactggggaagctgatcctgggctcctcttggccacaggtgacaagtattgggtgtttaaggaggtgacggtggagcctgggtacccccacagcctgggggagctgggcagctgtttgccccgtgaaggcattgacacagctctgcgctgggaacctgtgggcaagacctactttttcaaaggcgagcggtactggcgctacagcgaggagcggcgggccacggaccctggctaccctaagcccatcaccgtgtggaagggcatcccacaggctccccaaggagccttcatcagcaaggaaggatgtacgtaagggccgggccagggtgggcatggggagccggttttatgtggtcctcaccagtgcccacgggcatactcagtgcccatgggcgtccaggtttgaaaaaacacctggtggcagacaactgcctcatatctacccatgttcacgtggtccattaattcacttaccagctgccaagtcacactttttcatctgcaggaatgattcacggcagagagacgttgtcatagactgacttcattccttcagacagcatttctcaaacacttatcctcagtgtactccagggacgccttgagttacccaatctgaaaagcaatgatgggcatgcatgtttcaaagccactttttcacagggctcgagggcaagaagatggaaagaaaaccttcaaaaaaaatttttttttaaattctaagagataaggtctcactctgtcgcctaggctggaatgctgtggcatgatcatagctcactgcagcctcaacctcctagtctcaaatgatcctcctgcctcatcagcctcccgagtagttgggattataggcacatgccactgtgcctggctaatttacatttttttgtagcaacagggtttcactatgttggccaggctggtctcaaactcctggcctcaagcaatcctcccacctcagcctcccaaagccctgggattacaagtgtgagccactgcatcaagagagaaactttttatgtttcctgaactcctcctagaagccatgctggccaccagcccccacgactgccatcagacactcagcctgtctccccaccagcctaggagcttctcaggaggagctgctagcctggccagatgcagagtgggcctccaggagtgtttgttaaatagatctccattgatatggtcaaaaacacagactctagagctggactggctgggttcgtaaccaccatagtaccactcactatgaatctgagcaaatctttaataagttttctgttttctcatttataaaatgataataacagtacctacctttatataatggttttgtgaggattaaagaagacaaattatgtagcatacttagaaataatgcctagcacaccatccatgctgtatattttagctgctatcgtcatcatcattgtcatcatcatgggtttcagtttatgtggattgacaggattcattcactcactccataataatagacagcttgtgtggtgggagctggggacgtagcagtcaacaggacttgcagacgtccaagtctaggggcataaagcaagatggcaacagacgctataagggaaagactcccagcactttgggaggctgaggtgggaggatcacttgaggccaggagttcgagaccagcctgagtaacatagtgagattcatctctacaaaaaaaaaatacaaaaattagctgggcgtggtgacatgtgcctgtagtcccagctacttgggaggctgaggccagaggattgcttaagaccaggagtttgaggctgcagtgagttacaactgcaccactgtactccagcctaggcaatggagtgagaccttgtcttaaaaaaaaaaaaaaaggaaataaatgctgggagagagcaacgagctagagggggccgtgttagagatggctgggaaggagtctctgaggaggcttcactgctgagaaagccaatggccacagctgctatttgttggctgtcttgtatacctgatgctttacgcacaagatctccctttttggggagcctcagagacaggtgacatcaaggaccgagaccaatgaaagccctagccacggtgggaagccagccaatgaggacggcctaagcaagctgctttgcccactggctgggccgctcaggctgttgctcgagccctggggtggttgcccagggagtgattggcagggctgcccagcctctctcccagaaggctcccaaaggtcctgcatctgtgttgtgaagtgatgtgtgccaagccaaaaaaatccataattgcagagaggtcttgctgtcaacacaaggtgaaatcttgctccctgcctcccttggctcaagcaggagccaggctgaggcttaatggagcccacatgagcggggcaagggggacctgtgcgcacagtgtgacagagctgtgacccaggcttgcgtgcaaggggtcctgtctgggcagcacaaagtgaaccatgtcccagttctccctgaagcccctctggtttcctagcacccgtaggatgacaggcggaccactccaggtcccgggtgcccccctctgcagcttcttactccatgactcagccaagcactgcaccccaaacctccaggtgtgcccaccttgcctcccttgccacagtgcctgtgccctccttttcacactgccccagagcaggtgccggaagtgtctgggagtggtgatgctgggctgtatttctgcagattacacctatttctacaagggccgggactactggaagtttgacaaccagaaactgagcgtggagccaggctacccgcgcaacatcctgcgtgactggatgggctgcaaccagaaggaggtggagcggcggaaggagcggcggctgccccaggacgacgtggacatcatggtgaccatcaacgatgtgccgggctccgtgaacgccgtggccgtggtcatcccctgcatcctgtccctctgcatcctggtgctggtctacaccatcttccagttcaagaacaagacaggccctcagcctgtcacctactataagcggccagtccaggaatgggtgtgagcagcccagagccctctctatccacttggtctggccagccaggcccttcctcaccagggtctgaggggcagctctggccagtgctcaccagggccagcagggccctaggctggggtcgtacagctgaagtggtgggtgcattggcctaggctgagcgtggggcagggaattatgggggctgtgccccagggtgggtgtctggcacccagctgccagccttctgtcctgggcaaactactccctacttaagggaataggccaggctccatccggaggcagggaccatgccaggaggagcccctgtggtcacggcatcctgtggtgtccatgaggtaccacagctccactcctggctggaacccagcaccctctgtgggaagccagcactagctctcatcccccatccgggagataccaccagtcctggtccccttttgccaacacctgctggtcagatgtccccctacccccaccccactgtcctccaaggctacaggacccctgcttctgacacagtgagcaacaagcctgggtttccctgctggcagacggcagatccctcaggaaacctgctccacttgtcagggtctcttcggagacccaggatttagggtcacatgctgcaggcagggctgtggcccagctgggtctgacaaggacccagctgtcacatcgtgaatatttaaatgtcctgtcactactgtcccattttgcaaaggctgcttgaggctttaggtgaactagaggtgactgtcttggtgatgaggccagcatagcggccctcccccaggcgacaaggaccaaggtgctgctaaggccactctagcgcccagacaccccagtagctgagctctgctcctatggctacagagctggggcagaagctgaccccatttctggaggaagatccgagtttgtgaccgtcctccactcccctctattgtcactgtccccagctttgctccagtctgtcacttgcagcctggagctcagcctcaccagttaggtgaggcagagatggctgcagggccaacactggcagagcctgggagtccttcggaaggggaccagggcgtctgaagtgctcagtgcccccactactctgaggccgactccagctactctgaggccgactcaatctctcggctggaagcagtgttttcccagagcttggcccttgctgacctcgctcactgggcccatcttcccacactgctcttagaaggacacccctaccggtagcagccccaagctgagggggctccctttttgaccttcactggcccgcccttcactgtctccagcaggagttcctagggcttggcctgccttgctccacagtacggcggaggcagccctgcttgtcactgaggagccctagacaaggccaatgggttcatcaatgcccactggctctctgccaaagccaaaaaggtgtcaggcagtctccagcgtgctggccgggtctcggatgccacccctgctcactgagcctgcatgggccttgcccccgaccctgtggtctctgggattggggtcggcttaccctgtagcacagacagggactcctgctgccctgggagctgtctcaagcaaaatctcttgtcccagaggtgcccatgtgggtccgctgtgtcccctgtcatcatccttgttttttctcattttggccaagggcaggctccctgggacaggcagggaacaactgcggagatattagtgattcataggtttgtacagtgttttatactttgcaaagcactttattagctcacacctgtccactcacatgaaactcgtgttaggccctgggaggccgacggtaactctcaccgtgccctcagatgaagcacagagaggttgttacttgcccgggccatccagtgggctggctgggtcttgtgtccccatctgtggacccctctagggtctgagatgagatgagaagtgtctcctgtatccacctcttcctggcctcccttcccccacttcctggtccctgtccactcctcaggttggtgctctcacttcttgaaagctctaggcacccccgcctcccgccaggctccccattggctcctggcaggccagctgagaatgaacaggagatggaggcaggcagcccaggctgcagaggtgagggatgtggggccaggcccagagggctcagcctagaggcttccaatctcagattctcctgcctgtggtcatctgtttgtccatcaccccaggacagggcagacagaggggcaaagcactgggggccccagagcctagcttcccctcagcctgggggacatcacagcatttcagtgtcagtcacattttaaactgatcagcctttgtataatgttttttaaatcatttctaaataaaacagaaatacagagtgtgtcatttccctgggatgagggaacaaagatcaggttccaagagtaaccttaggacgctctgggaagagaaccgggtcctttggggtgtctgggagctgcccacccatctcctctgccagaccggcggtcagatagcctccctctacaacaggctggccctgggggcccagggttattggggttccaggaacacagcctgatgatgcctccttacgatccaggatggagagcagcccccccaggagtatggggagggtcactgtggcacgggcttctccatgacctgggacatgacctgggacacatagtcaagagcacggttatcagcaatacagatattaataaaaggcagacgaagtcaggaggtcagcaactttgcgggcttaccaggaggcctgtcctgcctctggaagccagcgacagagagggatgcccccgacccagccagccggagaaagggatggggtggtcacgaaggtctgagctgggtctgggtgtaggctgggaagcaggctggggtgtagactgcgaaggcggccctgccgggacttctttccagtccccggcgacctcttcgaattctctgctatctctggggagcctcgggtgggagggggtgtaagagacgcagggacgtggggagaggagacaaggcaggcaagaaccacaggggacggcggacagacgggcgacatcctgcggaggacgccgtcagtaccaggaagtgcaggcgatgaggaagcgcacgtcgtccagcggcccccacgggctgggctcgggctggggctggggctggggctggggctggggctggggcggatgccggggctgttccgggccctccggcgccgcaggctggggctggggctggggctgggtttgcgcaggctccggggcgccgcggccgccgcttagctgagcccccatggtctgcaagaagagaagccctttaaggtctgggtcgccgggacaccccgctagggccccgccccggctctgccctcacctctcgcagccagacccgcgggtctcccggaacccacctcggcgtcgggaggagctggcgccgtgacgccaccaccgcgtaccgacctcaccctccgtgcgttggagcggaaagaagggactcgaccctgtgcttcggggcggggctccgcgaccgtcccccgccaatcccgccccagcgcctcaaggccccgccccgcgcaaggggacggaatgcaccccaacagcctccaagacgcccaggccaggaggacgctgggaacccgctgccccgccccacgcccacccaggaaaagacctgcaacctccatccaccttagtcaaagaatgccccgaagccagatgccccagagctctcacaggggacttgcccagctcaggggaaaatcggaacggactctctgcctttcaaggccagagaagaccggcgcagaagtcgggtgaaaactgtgagaactagaccgggcgccgtggctcacgcctgtaatcccaacactttgggaggccgaggcggtgggtcgcttgagttcaggagtataaaccagcctgggcaacacagtgacttcgtttctacaaaaaaataaacgaggcgagaggatcgcttgagcccaacaggtcaaggctacagtgagccatccttgcgtcacaacactccagcctgggtgacagagggagacactgcctcaaaaagaaaaaagaaaaaaggagaactgtagtggagagtgtttcttgccccaggatgaagcctcacatcctgatggtagaggagaagggaatggcgtgtgtggaggtggtgaactgggttgggtgtgtgttgtgttcatcccaccctatcttcccagaatgctggaacaactggagagtgcagggattgtacacaggctgagggccccaaacatcacattcagaatggcccggagggaactgcactttaatggggtggcacaggacagcagaaccctcagccagcagccacagggcctgccagccagcacaacagagcaggtttttgcagtaatgatagatccaggcgataagcacaggtggaaaagggttgggtgcccagcccctcagtcccagtgagctctctgccacctccctgccagcatccggtacagattgggcggaatgtggagaaggttggccacagtccagagccaggagcccatggaacaacttggaaggtgactcaggtgaggctgaagagaaaggaaagcgcacggtcagtagctgtttcacagagcccacctcactctcaagtgaggtgcctgcctcagccctcatcccgggaccagctctgacaagctgctcaagcagctactgctctagtatcctagccctgaaaaaccacaaagatgaggattagcagatgctcaagaaatattttttgaatatgctggctcttatctgctcagcagtgtacagatatgctctcacactcgagaagctaccagaacaaactggtaggctcccattctagatgacatcttttccccatactctcaaaatgcaagttaacccccaaccctgagcagaagaaaggagaggccccaggtacctgtcaatgagggaatcccgcatgctggtggcaatggtgctaggctgggcttcattcagcttgaagacactctccaccactgacagctctgtgctggttgtgtccaggccacagaaggcacaccagtcattcaccaccatcccagcagcaatcacctcactgcctcggttcacagtccccgcctgccaagggatgggctcaatgtgagtcacggcaccaaattctctccctcctcaatgaagactctccccaaaccctgctcctccctgacctgcagccccagtcccaaactgtggcaggtaatgacccagactcccaaacactaggcaaaaggatctgcctcgggagacggggttcagaggacaggaatgcttaccacaagggggacttgaagaagagaggacagctcatcctggtcttcaattgaagtcttgggatgcaccagccctccctgattgctgaagacacagtagcttcctactagcacctggtcggccactgtctgtctgaagacttccaccttgagcacatctgccagaatttcttctgtctcctgtcaatcaaagatattgtgttcagggctcagaacttacagccccagaaccaaggttctccatgcccagaagcatccaggccttggctccctgagcccctcatttctcctctgtacctcatatgaaagcctcacccagagaaaggaggaagtacagcttagagcagagtcaagggcagctgtgaagcccctaatattcatgcatgccctgaacagctggaggctggtctcaatatcacttctttcccctctcacccacagtcaaaagttcaacagtcaatcacctatcctggcccaggatgcaggactggatggttcaatctccccaatcatgaaggattcataccctccccagcttctttctgacacttgataaggcctctgttatcactattccaatgagtacctgaaactcaagagcccatatagaaaaaccacaggagagacccctaattgctgcctgttgggaaagaacagtggctaaccactgactaggatggccctgtgactcttgggtcaagttgggctgcctcaccctgtccaagtctgggtggaccaaggccacgtagtcattgcaggtggtgacattgcccaaggctgagagccgctcctccacccgcctaatctgcactgtgtctgggaggctgttgcgaatgtgttgcagctcctggtcggtggtattgttgggtaccaggagaccgtgcctgttccctggagaaacccaaattagagggtgaatacacaagatgcctgctgagccctaggggctgaggataccactcagcccagcccaatcagctttcccaggaaagctttaggcccagagcccagccctccaacccactgatctggaaaacacccagggcaggccagagaccacccaggaatcccaataaatcctgcctacttcaccatcaccaactgggagggaagctgagctcttggcattagctgtatattttgctacttaaaaactgagctgccgggcgtgttggctcacgcctgtaatcccagcactttgggaggctgaggtgggcagatcacaaggtcaggagatcgagatcgagatcatcctggctaacacggtgaaaccccgtctctactaaaaatacaaaaaattagccaggcgtggtggcgggcgcctgtagtcccagctactcgggaggctgaggcaggagaatggcgtgaacccgggaggcggagcttgcagtgagccgagatcgcgccactgcactccaacctgggtgacagagcgaaactccgtctccaaaaaaaaaaaacaaaaaaacaaaaaaaactgagctaacactacacacatagcagaatggctagattattattttttaaggcagagtctcactctgtcacccaggctggagcgcagtggtgcgatctcagctcactgcaacttctgcatcctgggttcaggtgattctcctgcttcggcctcctgagtagctggaattacaagtgcgtgccaccacacctggctaactttttgtgattttgtagagatggggtctcactatgttggccaggctggtctcgaactcctaacctcaggtgatccgcccacctcgacctcccaaagtgctacgattacaggtgtgagccactgcccccagccagaatgactaaaatttttacaagtcatcaattccaagtgttggcaaagatatatggagcaactgaactctcatactgagacaggagtgtaagttggtcaatcactttagataattatctggcatcatctgcaactactactaaatagtcacataacctgtgactctgccatgccactcttaggtatcatatacccagtagaaatatgtacatgtgttcactaaaaaaacatagcagcactattacttttttttttttttttgagacggagtcttgttctgttgcccaggctggagtgcagtggcacaatctcggctcactgcaagttctacctccccggttcacaccattctcctgcctcaacctcccaagtagctgggactacaggcacccgccaccacacctggctaatttttttgtatttttagtagacacggggtttcaccgtgttaaccaggatggtctcgatctcccgacctcgtgatccgcccgcctcggcctcccagagtgctgggattacaggcgtgagccaccatgcccggccagcagcactattcctaacagaccaaagtgaaaactgcccaaatgcactgtcgatggaatggatgaatacgttgtgatatacttacacaaaacacaccatacagcaacaagaatgaacaatctacaaatacacgccaatcaatttctgaattccaggtcactcccatcataaaatacacaaggactaagctaaaatctcccttgttgtcagaacttgcttcaagtcctaagggcatggttagagatcagagtattttaactgaataggaaaatactttgaggtcactaggcttaagtttttgttgttgttgttttttgttttttgtttttttttgagacacagtttcactcttattgcccaggctgaaatgcaatggcacaatctcagctcaccgcagggtgagctccacctccagggttcaagcaattctcccgcctcagcctcccaagtagctgggattataggtatgcgccaccacacccggctaatttctgtatttttagtagagacggggtttctccatgttggtcaggttagtctcgaactgctgacctcaggtgatccacctgcctcgacctcccaagcaggcttaagatttttaaaaattaaagtaaaagtaaaaaaataaaataaacagacttctaaaagtgacctcaatgagcagaactaagaaacaatgggcagcagtaatggaagacagatccagcttaatgaaaggaccggccgggcgcagtggctcacgcctgtaatcccagcactttgggaggccgaggtgggaggatcacctgaggtcaggagttcaagaccagcctggccaacatggtgaaactccatctctactaaaaatacaaaaaaattagccgggtgtggcgggatgcgcctgtaatcccagctacttgggaggctgaggcaggagaatcacttgaagagagtgttgcagtgagccaagatcgtgccattgcactccagcctgggcaacaagagcgaaaactccatctcaaaaaaaaataataataataataaaaaggaaaggaccaacgaccagaattaacagtgctgacaggtaggaaggtagggtagagatgtggtaaagggaatttaagattccaacgtaactgagcaggaagaccgcatatcttagctaatctttacagagacagaaatggatgcttagaaagagaaagcaccttgcccagtcagtggcagggagagatgagatacaaatcctcggctgggtatagtggctctcgcctataatcccaacactttaagagaccaaggtaagaagatcacttgagcccaggagatcaaggccaggctgggcaacacagggaggccgcgtctctaccaaaaatgtaaaaattagccaggtgtggtggcacgtgcctgtggccctagctacctggtaggctgaggtgggaggatcacttgagcctaagaagttgaggatgcagacagctgtgatcttgccactgcactccagcctgggcgaaagagcaaaaatctggcctcaaaaaaaaaaaaaaaagagaaaaatccttctccaacactaggaactaggtgtggaacttactgagtcacttaggtcaagtctcaacttcctcatcagtcaagttaggccagtaactcctaccttctagtgtctttgtgacgaaggaatgagaacaggagtgaaagcactttacattatttgttattactattatccagcagcctttgctagagggttgccccgatctcctgacgcttggcctgagagattctatagtgcccagagataacagatgataccctgggaatccctaggtcactccgggttccctccgggggtgtaattaatggtgcttggagaccactccctccctcggcgtcctccacctgccttacccacacacatgcgcccgatgatgcggcagccggcgatagacgcgtgcaccacggggatggtatcggagagctcgccctcgaacacactgtagggacatggactcggtggtggcggggcagaggggccggcaccctcccactgccggagctcttgactcctgcgcacgcctccccgccaccgtaagccccggggctcccgccgcacctgtagaagttctctgagcctccgatcgctaccagacagtaggtgttggtgagcttggcaaagcagccgatctcacagttgttctcgaacgaagctcggaccgccatgaggcctaggggcggcggaggcgggagttcaaggccggcggatcctttcccaagtatcccggcctccgtccctcaggccccgccgcgaccccgcccctctcggcctcccggcccctccgtcctcgggtcccgcccactgggcccccaccagaacctccggccctgaatcctctggcccccacccctcccgacccaggaccggagctgaccctcccaggttcccctcacaccagcttaccaagtaaccagtaacaagctccgcacgcggcgactgtaccttggactccctaaaaaggtttccgtttccacttccgtccagggagacttccgggagagcccggcgctccccgccacgcatccagcccctctacctccggcctccggcggactctatggtcgcgagcggtctgggcgcgaccccgcctggccccacgcctagcctgctcgcgttcattcattcattattcattcaggagctttttaggagctgtcatcgacctagacctccggctggtcggttgtgaggcatgagggagaggaggggccaggagtgtctcgcggaagggttgatgatggaggtattgatggaaatgaagccggaggaagggcaggtttggggaaagggatgagtccagctgtgccttgagggacagaagtccatgtctggagcccagcaggggagtggagtgctgacgaatgagatgaggggctgaagacgggtggactagaagaggctacccatggagagagttccaggaggcagaagtgcggccagaccgaggctggagaaagagcgcagccagagacggaaaggcagccaggctgcaggtgctggagagaggggaggactgaggaagcaggggctcaggaaaaggctggaaaggggtccagggtgggcaaggatgtgggtgctggttggcttccacgatgtgcctctcgcacggcctctatcactcactcagcagccaacttctgtccccaggatagtgatgggggccaagggccctgctgcacacttggacaggatgaacttggcccacattttgtagaatctgcaaaagccccgggttctctcaaaatgtcacagtggtaacttggagcccctggactcccccaattcctccttcggcattcaccctcctccaggggtttccccataattggcctgaatggtgcccttcccattcccccaacgtgtccctcccataactcctcaaagttcaggatacaccaggcgctgtgattcacaataaagtctgcctttattgatgtgtatcatgtttactatcccgggtaagtggtgagttcaggaaaatggcccacaacctgtcacagcctgtacttcaagagacactcagcaagatgatgacgacgacaatgatgatgatgatgatgatgactcagcaagatgatgacgacgacaatgatgatgatgataatgatgatgtgtgtgtgtgtgtgtttccgggtatccacatactctgctcttcctcactcattcacctcagacccactcagtcctctttagggcatctctttcacctgattctctctaccaaaaatttttctaactctctcctccctctgtccaaaacctccccatccttcagggcctggctcaaaggccacctccatctcctctaagaaagttttctgactactccaccttctccaggactctctgccctttgttttctaacaccctctgtaactggttaacctttaacttgatatggctctgaccccttctccagcagcttgtgcatttcacctctgtccccaggtctgagtgtgacccacctgtcagctctacaggcccagcacagggctggaaacacagcctagattcaagaagatactagttagggtgtgtgtgtgtgtgtgtgtgtgtgtgtgtgtacacaagaatcttgagcccagagagtgtgtctgacctgggtttctagacacctcccttccccagtctgggacctgagcaagtccagagtctcggtggacagaggaggggcctgcccttgccagtgcacccccgatgccagtcctttggctaggactcaaagcggcttcggagctgcttgaacttggacttgttgtacttagtgatgaggtccagtttgctgtgacccagggtcagccgtttctcatccctgaccaggtcactgttaccaccattgagatggccacccttgggacccccaggctcagttccctgcctggccccgtgcaactgatgatacttggtgatgaggtccagcttgctgtggcccagggttagccgtttctcatccccagacccagctccagccgtgcgagcagggcttgatatcgggagaccattgggcccaggcccctcaccacggaatgggccgaactttgtgatgaggtccagctggctgtgccccagggtctgccgccgctcatctggtgcccgtctggcaggtctggctgaggagttggtttcaaggggcactctggaaccctgggccttggggtactgcatcaggaggtctgatt

SEQ ID NO: 369 - DNA, 65050 bp, Homo sapiens
gatcaaaacagctctgcaaacagtgtctccaattccccacaacacaaaccctgcctgttactcagctagacaggctgggcccagcgctgagcacagcacaaccgacgctcggcccacagcacagtccttcagagagcatcctgggcctggccaagacactagctggtgcctggcaactccgggctcatggtcttgacctctgtactacctaatcttccccagagtgacaacgacccctttggctctgggggggctgcctcctctgttcttgcatggtcctgttcaggtcatgccagcctactggtccgcccaagctgatggggcctcctgggtcccgtctcttgtcctgtcccaggcccctgtgtgagctctggggtcccatcccgtcctgggcagaaggctcttccctttcaggggaaagcagggaatgaacccactcccacccatcccccagagctggcggccttcaaggtggtggtgcaggaggagggcggcagtggcctcagcctcatcaaggagacctaccagctccacagggacgacccggaggtggtggagaacgtgggcatgctgctggtccacctggcttcctatggtgagaaccccttctcacctcacactccctagagcccagcggtcaggggtgccccgctccccctataactgacagggaaggagcacatggaaggtgggctcaaccccacttctcggcccacttaaacttcccactcatttggcatcttctgagcaccaggggttgtcctggctgagggtgacgcttggggctccggaactgcaaggtggctctgtgcatgccaagcccaagggggaatgtgacccactctcatccttctggggcttctggcaaggggcacaggaaggactctggcctcaggaccttcctgctccacctgcagaggagatcctgccggagctggtgtccagtagtatgaaggccctgctccaggagatcaaggagcgcttcacctccagcctggtgagtgacagcagcgccttcagcaaaccaggcctccctccaggtggaagcccccagctggggtgcaccacgtctgggggactggaatagatgtttgtatggaactgaccttgatctccacgtgtatagttttcaagactgctctcctgcctgcctattatcccatctctatgactgggccaaaatcaatcttaaacgggaggggtaatcagacctctccaaagagtttcctgtccatgactgctggattgagtcacatgagtaactgctcctggacccggggactgtccacgaaaactgacttgcctgcttcctccttccaggaactggtttcttgcgcggaaaaagtgctcttgaggctggaggcagccacctctcccagcccactgggtggggaagcagctcagccctgatgcgggggagaagacagataccccacaggcccctccctccacgtgtgccctctccctgtccttcctttccatgggccactgtttcccttggggtggggggaagggtcatccagcaccagaatgcgcacctcacactcctcttaggtgactaataaagaggcccaaggccagtttctgccttaatcatttctggcaagaggctgtgactggccagtgggatacttaattctgcagtctctatagacctcgcccctggacagagcagtccttccagaccattctagatgagagtcaacactgagcctccacaggctccattccaagtaaacatctgcatttattttaaatcgcatcctcggtgtgtctgccccttttctgtccagctgtcaggtggcccaataacgccttggactccgtccccttgtcagtgccactggctgttcctggctctagttcccaggggagcctcaaactggggcctagcccagaaagccaccggctagcatcacatagcttctccagctcaaatagcccaaggttggcatgtctgccgacctccaggaataaccgcagtcaccgtgcccaggcaacacatcctcgtgctatggggagaagcctctgctgggtgacccaccagccaaccctgggccaatttaatttagataaatgctcaaagttcaaacggccacaggaaacccctgatgtaacacctgttgtgccggccagctgtgtctcaggagctgactgcagacacctggtctgggtccctcaagcccagcagagcttgttatgtcccctaacacaaaggaggaaaatgtggctcctcgagaggaaggtgctgagcacctcaccccagggtgtcaccgaagatgggcagtgacagcaccgtatggactggcggcccacaggccccaacctcacctggcccagggggtcagcagtcggtaaagcgtggccaggcgtgcccatggccgtccctgctccccaccctgaccatccgggcccaaacacacatggacagtaagaccaggtttcagaccacaaagtcaagaggaaggaggaccttctcagtagcaccacgccacgcccctctgccatgattctgaaaaggtttcaccagagttgccactctggggagatgtgatctgtccctgtgactggtcacattgcctctgtagcggggcggcagcagcagcagggcaggactgctaggcgtcgtcactgcagtggtctggagcagtcagcagggggcgcctgtctcgggccatgctctcccactccttcttcaccatgacgtacagcctcattgctgcctgggcatcctgaatctagacgacatgaaacatcccagcaggtgacgaggcatagccgcagcccacagtcaaccccacaatgactgagccctcccactagccactctgctacagatgtactgagtgagacatggacctggccacgagatgtcaccaggacggggagggaggacacaagagaagcagagggagcaacgacctgatggtccccacacttctgtgactcagacacccctcccaggagaagaaagggaaacccaaagaggagaagcaacaaacacgctgcctttttaggtctctgagtgcagggtgatggcaggttgggtgctgggcacaggggcacaaggaccaagcagatgggcaaaaagggcccaaagcactgaggccacgttggcagggggtgactgctccacagaggcagagccagctgctcagtggggccgggcagggcagggctggagggctgcgggggtggggggaccctttgtaattatttggcaactttttctccaaataacgagaatgcagtacttttgtgttaagtgttaaattcgttaaatgtgcatatttagaatttaaccaaaattccgtaactccgctctaccattttttttttttgaccaatagcctcgtaggataagtaggtgcccaagccccacctcccccatgtctgtgtcaggtgactcatgtctggttccaggtgggaaaccgccccaaaccccatgaactaccccacaggacacacttactgaacagtgctccgcctgctggacctggagcccaaggatcttctctgaaagtagtctcagagacggccttccactctgcaaagggggaagaggcgggtgggggcctctgcaggctcggcccaaagagggtcaccccaccaagcagggagcggttggctactgaacctcacccaagcgacctacagtttgcctctcagtggagaggtgctcatggcacttagggtggtagccaccagctgccatttatagcatgatgggctggtgatacacccctatcagccaataaaaggagagggccaggggaggagtcagcatccccatctcccatcttgaggcctccctgcttatttcaagagggacagctctggccaggcatggtggttcacacctgtaatctcagcacttaggaggccaacgagggcagatcacttgaacccaggagtttgagaatagccagggcaacacagcaagaccctatctctaaaaaaataaaaataaaaaaattagccaggggtggtggcatatgcctgcagtcccagctacttcagaggctaaggtggaaggattgcctgagcctgggaggtggcagttacagtgagccaagattatgccattgcactccagcctgggtgacagagcaagaccctgtctaaaaaaaaaaaaaaggatgaagaacggctctgcccttggcaccctctagagcagatacgacagtggtaccaggcccttagtcagtgaccctgtttcagaggttagagtggaaataacttgccctccgttgcaatcatttttaaggtcagcaattagcagaactctatttttaaacattccttctagttttaaaggttaaaagaaaaaacaaaaaccctttaaccaacaagtcagccaccagtgaccagaaacaatgaagtgaccagcaaaacagaaatacagtatcttgagtcacactcattctaagtacctttacttgactcttgaaaggtttatatttctgtgtgtcccgaatcttcttttttggatgatcaagaaatagtacctagaaaaataaaatataatgataatcattttcatttttggtttgtagtagcagaaccccctccccccgccaccttttgcaagtaacatctgtgtgtgtgtgtgtgtgtgtgtgtgtgtgtgtgtgtgtgtgtgtgtgtgacggagtcttgctctgtcacccaggctggaatgcagtggctcaatctttgctgactgcaacctccgaccccaggtttcaagtgattctcctgcctcagcctcccgagtagctgggattacaagtgcccgccaccatgcctggctaatttttgtattttttagtagagacagggttttgccatgttggccaggctggtctcgaactcctgacctcaggtgatccacccgcctcggcctcccaaagtgctgggattacaggtgtgagccaacgcggctgccctgcaagtaacatcttgtagggaatccaagtgtgtcacacacacatggaaacaaggcactgatatgaatttcaactccagaaggaaatttattgcactgacttaagctgatgcccaacagtcagagacaataaaaacaaaatcttgaaatcaaggaagtaggagaaaaacagtcaacagttaaccagcaaccaacttattcctatattatacttgtattttgagttggttctacacatcaggaagttgcaaataacacattttaacagctcatcttgcaatcttagcatgcaattttttgttttgttttgttttttgataggatctcactctgtcacctgggctgcagtgctatagggtaatcatggctcactgcagccttaacctcctgggctcaactgatcctcctaccccagtctcctgagtagctgggacaacaggcacacgccaccacacctggctaattttaaaattttttatagagatggggtctcccctatgttactcaggctggtctctaactcccggcctcaagcaatcctccagcctcagcctcccaaaaagctgcgattacaggcataagccactgtgtctggtccttagcatcatcttcaagaaagacttgaacatgtgctgcgcaaggtgccagggatggagtcagagtcaggagggaaggacgagtccccacggcagcagtctctgagggggtacagcaggagcacacagaagacctttctgtgaggacactgcccggggggttctcacctcagtttcaccctctgtaaacaagcatgaacacctccagcatcttcaatggattcaagggatctctacagtgccgtcacgggagcaccatagcaaaggctgctgcctgaacattagcatctctgtcacttccttctgaacggcttcaagttcctcaccacactcaagtgcttcaagccggtgggcagaggtgacaacttaagtgtctctcccatctagcagactggcctccccgctgttcccactgtgtcctttaaaccaacatccaggcatttgcccataaactcaaagtgacccccaccctgttctcctgtaaatacacacgtactcgctctgcctgactcttcattcctgcctcgggtgaccaggagatggcaggctgccctccccacccatgacgccttccctgcccagggtctgtatatgtctttgaacttgtttcccacggtggtggtgtctgaatttgcactttccatctgaagaaccaggggctgccccaggcgggattttcctcgggacgccagaaagaaggcaaaggcaagctcccagggccagggtgatggttaggcaagcgtaacctgaacatgggccacagggcatctgccaggataaacttgtttcctgtggagggaccctggtcacggatgggacaactggacattaggccttcctccaggtaaaaggggtatcagcaccttcatttctcattagggcggggttgccagctgctctggtatgggtaccccagtttcgctgggggctctcaaaacaagagcctggcatggctcctaaaacacagtaagaactcagcacgcggtatctgatattattaccaaagtattcccaacatagagcacaaacccacacattgttaaaactccccaacacagcaagggcgtgagtgtaacacccacggagcaggggcaggctgagtccccaggagagagcccagtacctttaggtcattatgcagagcgtgccccactagaattctgcccttcagcatctctgccacttccttctgaacaacttcaagctcttctcctggaaaatcaacacaaagaagcggttttttgcaacacacacatcaccatcattctgtgaggaggcagccccgctcctacccctggtcagacctaagacaaatggtcaggcctgcaatgccactacggagggtgactcgaagccaccacatccacccacccccctgggagaagtgccttgtgggcccctggcaggggtggctgcgagaaccacctctgaggagaggaataaagtgctccacacagtctgcaaagtcggctcatggctggaggagagcatatgttgagtgtaggcactgagaaacttttagagccgcctggcagcgtggttctgcctattcaacctcatgatttacttgacaatttcccaaatggaaataaaaacaaaactgcccccacaaaaatgggtagagatgtgttgccctaggccctgggctccagaggcagccttgcctgcttctggggaccaccccaccaccaaccccacttgtaccccccgaacaggggtgattagaccaagggtggcccgagccaagtgggaccagctaattttttaaaaatattttttagaaggccaggtgcagtgggtcatgcctgtaattccagcactttgggaggcggaggcaggcggatcacctgagttcgggagttcaagaccagcctgaccaatgtggagaaaccctgtctctacttaaaataaaaaattagtcgggtgtggtggcatatgcctgtaatcccagctactcgggaggctgaggcaggagaatcgcttgaacccaggaggcggaggttgcagtgagcccagattgtgccattgcacttcagcctgggcaacaagagcaaaactccatctcaaaaaaaaataataattttttttagaaatgaggtctcgctatgttgtccaggctggacttgaactcctgggttcaagcaatcctccctcctcagcctcctgagtagctgggactacaggcatgagccaccgtgcccagctactggcctggtcttgaagtcagcggacaggaggcaatgaagtgcaaggcataaatgggtgtaaagccgtctaaggatgccttttgtattttaaaacccatcgccccaaaaggagacaagacgcatcaaaaccagctgcagtgagtggtctcagacagaaaagggaacaaaagggagaaaacgaatccagttactactttcccttctaagttcctgagctgtggatgacataccctgcttgaggttctcaggccgaatcccactgaccgctgtcctatagtccgtcacgggctcagttggtttgacgtacttgtcataaacgcacttcccatactggttcacgatggacacacgggcggccatgctctcctcccccttagggcccacgcccaccatctcacagtccaaggctaaggctcttgtcaggctgaagggtaaccaaaggctgtagtttaataaacacggcaggccacagggctccaggtcagagccccagggatccatggactaagtgtcagcagagaaaagctctctgcccctcactcatttgcacccacgtgacaagctctgtgtggtcctggttcttagcaggaccctgggaggtgcttgcctcattcacctcagggagaggaaagcatcctcttccttgaagaagccccgccctccacggctaagcatccccagcagaccccactccctgagaccagcgtacccgccgaaggcctgctctttcacgaggctgaggctgacgctgccctcgctctgacccaactgtttcctcgctatcttggccgcctctggacctatggcagcttcgatatccgctgggtccacgtcgtcaaaccagatgtcttccctaaaaggcaaagataacaggctgatcaccagaagaccctagtgcaactggtggggtggggctgtggggctgactgtgcaggtgagtggagcgatggcacagcctgcctctcccacaggctggccccagacaccccgactgctggccctgctgcttctgctattttgatcatcttggcattttccttttttttttgagatggagtctcactgggtcacccaacctggagtgcagtggcatgatcttggctcactgcaacctttgcctcccaggttcaagtgattctcttgtctcagcctccctagtagctgggattttacaggcgcccactgccacgcctggctaattttttgtattttcagtagatacggggtttcgtcatgttggccaggctggtcttgaactcctgacctcaagtgatccacctgcctcggcctcccaaagagctgggattacaggtgtgagtcacagcacctggcctcatctcttttctttttaattagaaaatacactcattattcaagatttaggaacacagacaaacacaaagaatataaaacagaaacacataacccaccacccaagtgtaatgagtgctaacattttaattatgaaggtaacacgttcattattgaacacttaggaaacagacagacagaatgcctgtaagatggaaacacagaaccccttgccctccgtactaggaagctcacacaggcacgtaacacctgcctggggaatctgtctcttgggctaaggttaaatgtcatttccttagaaaagccattcctggccccactgaatggacacgtccctcttgttccaggcacccaataccttctcctcactagatttatcctgaccacacttaatcaacagctgcagtttacagtctgtctactgcacttgacaataagcctcaagagggaggagcaggcccacctcactgaactctatcccagacagcctgcctagcacaacacagggaggcccccaaatggctcattcctcagccatcagcgactgtgtcctgaacacccaggcaacatgaagccagctgtaacttatgaacacgtcacctccagctgaaccattcagagaaggccactgactcccggtccaccccacgtgggtggccagcacagggtttattcttttcacttgtttttttgagagtcttgctccgtcacccgggctggaggcagtagtgcaatcacagctcactgcagcctcaacctcctgggatcaagtgatcctcccaccttggcctcccaaggagctgggatcacaggcaacagccaccacacctggctccatcacagggttgaagtaatcaccaggcactgagccaagagtgccaacctcacaatctccttatgatgccaccatgactaccacaaggcacagaggacgtcagaaacttgccccaaaccacccaactggcgagaagcagggacaggcctcatacttgggtctttctggcttcagcacgctttccttccacacacgtgtactggcacccactaaatgctgagctctgctcaacgctcggaagaagcaggccctgccttatcatgcgcacactctaggggaaaacaagtaacagcgagtaaacaaaggaacagacgacatcagggtaaagtgatggagagactgcggtgaggccaccagcctccataaggagacaggccttggtgaagtcgctgtgcctcggttctcagtggtgaggtggcccatacttactcggtgggtggggctggggctgcctccttagctttccgcttcttatgctcgatgtcccctcgttctggaacaatatcaccatttgtcctttccttggttcctttcttattgtgctctgttccactggccttggtgcgaggtactggcgccctcctgtccatcttggaacctgaaggaacagagcccctgctggcctcctggtcttttcctgccggcatctcctctcccttcacttgaggcgaggtctcttttttgttttgctggataattttgggcttctttttggaacccatctgagagatgacaagaggcttttctggggcctgagatttttgtttcagcagccactgggacccaaaataaaatacatgctgcatttgaatttggaaattacacacagcagattgaaaaaacttacgtgtgtatgtatatacacacatatacaccaaacacatctatacaattcccatccgcatcactgaaattcattttcaaacggtttggaaaaagctctttttcattctcatgggtcacttgtggtgaaatgctgtttctttgcttatcttattataatgcattttgcacctgctccttcatgcatacaaaatgtcaaactcattctacaccttgggtacctgttgagtggctggacaccacagaccacttcccttttcagcttatctagaaagaattttggagttaacttccctcacagcttgggccaacatcctgctacacagaaatcgctttttttttttttacaagattccctggtttgctactgctgtgaagatctcaggaaggtggggggtgtcataaatgaaaagaaaagcttctgtcaaactggagtggctgaagaactgctagcagccacacaccttggctgtcacccaagcagaggctcctgtagtcttagagcccagcttcctccctgtgttcaaatccccagtgggagtgggcgccaccacagtgcgatgatgaggcgggtgctacttacctgttctgtgataggtaaagaactgaagggctgactttcttggatgaattagaaaacactccaaagtttccctatagcacacatcccttccattcacttattttgcttttctttcttgggagaaggaagaagagttggtgttcaagaaatcccacagaaccctggggctgcccacgggaatttgactggtcctgtgtgttaagacaggaatgtctgcactgagatactgtgcagagtattaggaggttcaagaagcgctcggggaggctgaggtgggaggattgcttgaggtcaggagttgaagaccagcctgggcaacaaagtgaaaccccatctgtattagttcattgtgcactgctataaaggaatacctgtgtttggtaatttataaagaaaaaacgtttatgtagctcatggttttgcaggttgtacaagaagcatggtgccagcatctgcttctggtgaggccgaaggaagcttcccatcatggtgtaaggtgaagggggagcaggtgtgttgcgtggtgagagagcaagcaaaaaaggtgctaggctctttttaaacaaccagctctcaaatgaaccagcagagtgagaacttactcgttactgaggggagggcaccaagtcattcatgagggatctacccccatgacccaatacctcctatgggccccatctccaccactggggatcacatttcttttttaaaaaaactactttttacttttatttagagatggaatctcaccatgttgcccaggctggacttgaactcctgagctcaagtgatcctcctgcctgggcctcccaaagtgctgggattacacgtgtgggctactcgggaggctgaggcaggagaatcactggagcccaggcagcagtgagctatgatcctaacaggaggtagctccaagggagctccaagggatgtggtaagaatgtatgagtgacgcacgtggaagagtgtctgggagagagcaggcaacctctacagaagtgcaggtcactagggagacagcaggtacaacacagccttaaaagcatggactccagagtcagccacctggttcccagccgcaatcttagatgatctatttaaacttttccagcctatttcctcatctgtacaatagagatgatgaaagtgtccacctcacagtcttattgtggggattgcaacacacatggcatagagcacatggcagagtgcacatttttaggagctcaattagtatttacttcaagaccgtaagtgtcgctagaaccccatcacatgtctgctatctgcttttcacttctacacaggaatcttctttctccctgtcttgctacacagaccagtgtgttctttcgttgttgttgtttgagatggagtctcgctctgtcgcccaggctggagtgcagtggcgcgatttcggcttactactgcctctgcctcccgggttcaagcgattcttctgcctcaggctccccgagtagctgcgactaccggcgcgcgccatcacgcccggctaatattttttgtacttttttagtagacacggggtttcaccatgttggccgggctggtcttgaactcttgacctcaggggatctgcccgcctcggcctcccaaagtgctgggatcacaggcgtgaggccccgcgcccggcctggtttcgggattttaagctaaatttctctttgtaaaatccattctagttagttcattatgcaaaaggtacaagggtttatctttgcttttttgtacttgaaataattctttcatcaatttctttcaagcaaacaagttcgagacctccctcaacaggccacctttcttgtgaaaagctgtttacaagatttcgattcaaatctgcctttacaggtcttttggggctacccaagtctttccctccgtcgcgttctgcgggaatgagctgcgcagcgctccgcccgggccccctcaagcctcacctcttgcagcgccttccagttttgagaaaagtcttctggtgcctttggaggtcgcaccacagcaccggggccgcttgctggcttcttgcttacttcccgcgccttgcttttccaaaacctttttttcttcttgtttttcttccgagtgagcgtcttgacaggacccggcttagccacggggctgctcggggcgcgcttggaggcggggaccttcgccttccccatcctgctgccgtccagcgcctgggccggcggccacccgagaccccggcctccccgggcccggcgccctggcagcacaagcgcctgcccaggccaggccgaaacacacccaccgcagggaccccgtccaggaaaagactccggaagagaccccgcacgcgttgcgcatacctcagcacgcacgctccagtccccggaagcgctcgtctctccacaaccggctggaaaccggatccctgcctctggttccgcgcagcctgggcggttcacccgcacgggacttgggccgccgccttagccagcggcatccggggtcatcgacctcgagtttgactggggcaagccgaggacctccccaagatccgggatggggatgagagatgcgaacgccggaagggaactggggggccgctgtgtgtgtagcacccggtagggcagctgagctgggggcactgggcggtggggctagtgagagccgggctaggtcgctcgcctgcgtcctggactctcgagcctttcccgccttgggctgctccttgctcagcctcacagcggctcatcttccacgtacagtggggaaactgaggcccaggcaccgggaggagttcctgccagttcactctgtagcaggacgagccgcagacaagaacccctcagacaccgaattgtagaaggaaagggctttatttagtggggagcatcggcagactcacgtctccaaaaaccgagctctctgagtgagcaattcctgtcccttttaagggcttacaaccctaagggggtctgtgtgagagggtcgtgatcgattgagcaagcagggggtacgtgactgggggctgcatgcaccggtaatcagaacgcaacagaacaggacagggattttcacaatgcttttccatacaatgtctgaaatctatagataacataaccggttaggtcaaggattgatctttaaccaggcccagggcgcggcgccgggctgtctgcctgtggattttatttctgccttttagtttttacttctttatttggaagcagaaattgggcataagacaatatgaggggtggtctcctcccttacttctgcctcctgggttcaagcgattctcctgcctcagcctcctgagtagctgggattataggtgcacgccaccactctctgccaatttttgtatttttagtagacctggggtttcgccacgttggccaggctgtcttgaactcctgacctccagtgatccatccgcctcggcctcccaaagcgctgggattacaggtgtgagccaccgtgcccggccgggagtgggtagatttgatgtgcgtgtgtaacaggcagaggttgatggagtaacagggaagtgaggctcctaggattttggtctgagcaattgggtgtggccatttatcatctcaataaatgtctgcggggagcagggtgaagtatgggggtggagccatgagctccttttcacacttgctgagtttgaatgggccgtcagtcaccaaggagagacgtctaatcagcagcaggatataagattcctaagcttagggaagggtcagtgctggagatgtaatttggaaatcgtcagcacataattagtgttgaaacatgaacctgggttagttcatccaaagagagagtaccaatatagggagtgaagggttaagaccagatagcaggtgctgggggctctccaggggcgaagcagcagaggaggctgagggggagcagtcagtgcagtgggaggagaagcggatgtgagtggcatcagagaatccagggggagaataaaccacatcagatgctgctgagaggctgagaaggacgaggacagagagatgggaaccagatatggcactgagattgtcagcaagtccaccgaaaagggttttctttttttttgtttgttttgagacggagtcttgctctgctgcccaggctggagtgcagtggcgtgatatcggctcaccacaatctccacctcccgggttcaagcgattctcctgcctcagcctcctgggtagctggaactacaggtgcacgccaccatgcccagctaattttttttttttttttgagacgaagttatgctcttgtcgcccaagctggagtgcaatggcgcaatctcggctcaccgcaacctccacctcccgggttcaagtgattcttctgcctcagcctcccgagtagctgggattacaggcatgtgccaccacgcccggctaattttgtacttttagtagagatggggtttctccatgttggccaggctggtatggatctccagacatcaggtgatcctctcgcctcagcctcccaaagtgttgggattacaggcgtgagccaccgcacctagcctaatttttgtatttttgaaaagagacggggtttcactatgctggccaggctgatctcgaactcctgacctcatgatccgcgtgcctcgtgatccacctgcctcggcctcccaaagtgctgggattaaaggcgtgagccaccacacctggcccaggttttctttttaaaaaaggaaaaaaactttgttccagcagtttgtaaaccagggcaatgcagccttctgtacaaaggtgcattccagggaacaaagagaacaaagaaagaggtcgtcttttgtagagaacttcctgcccaggttcccactttggtccacttatgcaaatgaggaaggcacacttgcttagttctgattggttaatacttgctgagttcagattggtcgatgcaggtcacagtcgatgggttgattctggcggcataaacaggaacagatagctgtgaaaccatcccagagttaagtgagagtgggggctttccaggaacgcagaatgtgtgtgtgaccctagtcagcaaatggctgctaggtcctactttgaatttaggcccagttagtaacttgggatccatcaagaaggattggctctttcagggttcacaaagttattggtgaccttttaaagatcaatttcaatggtatgtgggaattgaaggcaaggaagtggagatagccactgaaaataatgtttctaagttcttaaagacagccagaaacagggctatggcaggaggacagtgtgggtcaagggaaggttgttgattgtaatcaagagacaccagagtgtctgggcttggtggctcatgcctgtgatcccagcactttgggaggccgaggcagtcagctcacctgaggtcaggagtttgagaccagcttggccaacatggcgaaaccccacctctactaaaaatacaaaaactagccaggcgtgatggcgggtgcctgtaatcccagccacaagggaggctgaggcaggagaatcacttgaacctgggtggcggaggttgcagtgagccgagatcgtgccactgcactccagcctgggtgacacagcaagactctgtctcaaaaaacaaacaaaaaccaaaaagagacaggagagtcattcatgctgatggagtgagccaggtaccaggatctcgatatctaagcatgcccccttctccaacagcctccttaccttcctgcatgaaagcacacccttccctccagtcccccattcctttattctgctgtatttttctccataacacttaccacctttgaacatactacatatacaacatgtgtctgtctagcaactttgctgtctggctctcttccctagaatttaagctgtgagaggccgaggctgctgtctgcctggcttggggctgctttcctggtgtctagcacagagcctggcctgtttcaggggctcagtgaaacatttgttggctgaaggaatgaatgaatggctctagcagaggggcagaaactaacgatgcaggaggagagagctgggaagggatccagagccagggcctggcaggaagtgtaggtgtgtcctccctgatcgcagaggaggagagaggctgcactttgaggggtggaaagacaaggtgaatccccctgctggtcatcagcttgtgcggctctgtgggtgtaaaagagtggtttggagcatgtgaagtgagtcttccaggagatgaaggggattgccaggccgtttgtgatgatgctgagatctggtgccgtgcagcctgcttctgcgactctcctcatcaggcgcaggcacagagtaggtggagagttgagccagaaccacgatgtctttggcacagcctctcatctgtcagatgggagcggggaccccggagagggagtcagccgaggtcctggcattccttgtgaacccccgtctgtgggtttctggtccagtgtcccttctccagattagatggcttaggcctcctctaagggggtgggcgtgcacatccggagagctgtctggtgtgcaggactgggctgcaggttaccctgaactgcaaccatcttagagcaaggcccagcttgcagcaggaggagctgcaggccgcccaccctagccacggcccctgccctggcaggaagcttccaagagtaaacactgcctaatcgtcccgcccagtagtgagcaggcctgtcccattccatactgaccagattcccagtcaccaaggccccctctcactccgctccactcctcgggctggctctcctgaggatgcaccagcgtcacccccgggcaagatgccctcccctctgtgtggccggaatccttgcctgtggctttctcctgggctgctggggaccctcccatttccagcaggtgggctcatttgcaggagcgggggtattctgggagcctctgggtggggtattctgagctacctggggcgaggggagtgccaaatagctgactacatcagctttggggtttgcgctgggcaggggagtctgtacttggggctttgggggatgaagtgtgctcactgaagagggagttggtgtctcagtacgacctgctcattcggtgaagctgaacagacagatactagtttgtcccaaactgtgtaggttgctcttctctgcctctcccttcctctccctgtctctgatttccccctctccttcttggttggcctcacccacctcctgcctcctgtctccctcttcatccatctctttttgttcttttttctttctctctctctctttttttttttttttttttttttaagacatggggtcttgttatgttgccccagctggtctcaaactcctggactcaagtgatcctcccacctcggtctccccaagtgttaggattacaggccagagccactatgcccggccccatccatctctttttgtcttgcagagttgtcttcaggctttggagccacaggccgtgtcttcttacttgagccctggtgctcccttaaaaggtacttgtcctggtgtcttctctcccggggggagtttctcaggactttcaaggggtatctcaccactgagtcagtggtctgggatttttggtggatctggaaggagaaggtcagagaagctgctgtcaaccctgttaattaactctgttacttcctgccaagttgatataagctggtctgggtgttccagccaggccagggttctcaccctagcttctgttaaatatcacaagggaacggtcaccgattggctggcccctcctgccccatggcctctgctgagctggctgattttcaggagctcttgtggtttctgaccgtggatgtaaatatttattccttctgtgggaaacaagataggtactggctcaggctacctcctaaggccatggatttccttatgataaaggcctgtccccattgcccacaggcccatgtctgtgaccttctccggtgcgagcccccttcccagtagggccattggcaacttgactaatggctgatgggggccagaggcaggtgggctagtggtcaggggcaacaggagggcaaggcccactttgtgacctggttctttgtggtctaggccagaggcacactgaccagtgcctggggccacgctgggggctggatgcagccgacgctgtctgggtatcccatagcctgggtccttccagcgctgccgctcctgaaaggctgggagatcattgcccagggtccctgaccctctaagggctcccttgggagaggacagtgagggctggcctgggcccctgcttcccaagagaccactgggctccactcgtgttcagtttcctgtcggggtccatgatgttacttgtgaaacacctgtgcccagagcagggtccaggaggcagggcaggggctttcccctttgggcagagccaccagggcagtgggaatcttgtcttgatggggtgacccaaagcacacaatagcccaacagctcctcctgggccctgccctttgcgtgcctagtcactaatggggtctggctcttggggtgggggtgacacgcaatgtcttgacttcggaaggccatccttccaagacctgccagcccctttcctgttagctttccactgcttgctctctagaaccatcgccctctgctctccctctccccctccaggccgccctccttcccctggcttccagaggcagaggcagaggcagaggcgggctgcaggcggcatcctacacctggagctgctggtggccgtgggccccgatgtcttccaggctcaccaggaggacacagagcgctatgtgctcaccaacctcaacatcgtgagtgccccacgctggactgtgcaggtccccacggccagggctggtgaccaatgtctgtgggctggtgtatctggtagtctgaatacagtgggttaaactcaggtagaatggctcggggttcttcctcttctccctccctcccctgggtggaggtgggtgaggtcccacaccctctctaggctccatggcacatgcacaccctgcagcctctcactactcaagtcccttcacctggggccaccctcaagcctggcctcttccccagtatccatttgacccccacaaagctcagctaaagcaaccctggcaaatgggatacgggctgctcacactgccctctgcaccccgaccctgccctctctccattctcttgtcccccgctcagagtggcgaggacaggtcacccgtctgaagtctaaacagagactgctggcaaaggagatgcccaccttcatttcttgctagcacctgaatccctgcagccccccttcacttgaaagctggggaagggcgggcagggaagcactcccccactagccgccgtctcagaaagacaaacaaggccaggcgcggtggctcatgcctataatcccagcactttgggaggccaaggcgggtggatcacccgaagtcaggagttcaagaccagcctggccaacatggtgaaaccccgtagctactaaaaatacaaaacttagctgggcatggtggcaggcgcctgtaatctgagaggagcctgcgatctgagaggagcagcgtttgaccggaatatccgactcgtgaccatctgtgtgctctcatccccttgctttggagtttgttttccttgcgttagttggccttcctgagccatgagctgaggagcaacagaggcacggctgactgtgcagcacattttaggagccccccgccccgcccggttcccacacatgctggtggagtagcctctccagctcttcacactccgggggcccctgggagtcagcagctgcctggggctggcaatgcccacccgacgggttacctctctcatctgcccttgcacagggggcagaactgcttcgggacccgtccctgggggctcagtttcgggtgcacctggtgaagatggtcattctgacagagcctgaggtaggcatggagctggaactcagcacaccatacagagcgggaagcccaagtcatcgcatctccatcctctttaacctcttgtcccggatgccccaagcagcatggatcacagaatgcattcagccagacagaccagctgccctcccagctctacccagcactcagcacaggctgcctgactacttctctgagcctcagttgtctcatccctaacacgggctagtcatagggttgttaggaggactaactgggaaacaaaccgaccgcagtcagcaccgtgcctggttggggtgtcctaaatgcaggctttgctgtgggtccgcagggtgccccaaatatcacagccaacctcacctcgtccctgctgagcgtctgtgggtggagccagaccatcaaccctgaggacgacacggatcctggccatgctgacctggtcctctatatcactaggtagccgagctttctgatgggtgctggccagccagcctgggaaggctgctccctcagcctcctgccctctgcaaaggtgaccccagggcaggcacgtgccttggcaccacccaagtgactgttttctctcaccgaggtttgacctggagttgcctgatggtaaccggcaggtgcggggcgtcacccagctgggcggtgcctgctccccaacctggagctgcctcattaccgaggacactggcttcgacctgggagtcaccattgcccatgagattgggcacaggtatgtagccccaccagctgtccccaggatctggcaaggagctgacctgggtacccagggtggaggtggtcttagcaagcagtgggtccttgtagagtttctccagaggagcctgtacccctcaccccgacagactcaggtgtgaggacaggggaacctgatactgtttgattaaaagaactttttttccaaaagacgagcaagacacctttagcaggtagaaaataacttctgtagaaaattcaggtaaagaaagagcaggctgtaaaaattatctcaaatcccaccatttagagataatgtctcttcacattttgtatttaatttcagtcttttctttacatacacacacatatttcttatttgcaaaattgggatttagtttggatccctgaaaaaaaggaaaattgtgattatgctgtgcattgctttgttacctgctatttctttttcttttcttttcttttttttttttgagatgaagtttcgctcttgttgcccaggctggagggcaatgacgtgatctcagctcattgcaacctccacctcctgggtgcaagtgattctcccacctcagcctcccaagtagctgggattacaggcatgtgccaccacgcccagctaattttgtatttttagtagagacagggtttctccatgttggtcaggctggtctcgaactcccaacctcaggtgatccacctgcctcggtctcccacagtgctgggattacaggcgtgagccactgcatccagcctttcttttttcttcctagggtaagtgcaggatttacctgttctttatgtaataatatatcccaaacattatcccaggtatcttagaggtgtgcaccgtaatttatttaatcagtcccctcttcttggatgtctaggttgtctgaacacgtcttcctgttgtgaatgttatgcattcttgtgggcaaaccttcactcttacctataaccatttacctagagtgatgggtttcttttcatttctttagttttttaagtatgaaaataatacccaattgttgtaaaaattcaaacagtgcagagatttctaaagtaaaaagtgaatttccacattccttgcccaccaacccccacccgacccctttcaacccctctgagcctgggagggttgaggcagggttcctgggtgtgggacaaggcagggctccttctccctcagagggagcatagttcccttctgctcctgtgatgcagaagacgtgagcccccaaactggggcttagcctgggagggttcttggcttcaccgaggaaagaattcaagagggagcaggtggtgttagacagcaactttgattgatgtggcagtgggcagagtgtacagccctgtgactgtatacagcacagcatagccccttttgaagccaggctaccccatagacactgtgcccaaaagagcagctcaaaggcagggctgcagtcctagttaatacccacttctaattatatgcaaattaaggggccagattatgcagaaatttctagaaaaagggcagtaacttctaggttttcgtcatggaaaaggggcagtaacttctgggttttgccatggcaatggcaaactggtatggcacactggtgggcgtgtcttatggaaaggggcttcccacccctccctgttttagctagtcctctggtccagtgtccaagcggggcctccagagtggagtccacctcctacctcaccggtgcctggcctctcccaccccattaggagtcctccatcagttccgctttgggtaaagcaagctctgttgtgacagtttggaaacggttcaccttcctggcctaggaatgcaaacaatggccaagggcaagcacgttttaactgaactttaaaatcgtgctttcctcacagtaggtgaatttcacgctcaacacatccatgtaaacagtccccagagcagcccttcaaggccccggccagtccccacctccccacagactcctaacaccatgatttaatgtggcttgcacatttttaaaggcttttgatatttattagcaaaagatgcgagagccaccctgctgggctagcgctcccttctgggggaaactgaggcagggcgcacgcgaccctctccactgcgcccagttagcagatggcggcgtcaggggtcgacccgggtcggaaaactcgctggcgctgcggcactagggcgccgggccgctgactcgccgacccccgtcccgcccccacccccgcccccgcccctgccggccgccttagcgcaactccccgccccccgaccagcttcggcctggagcacgacggcgcgcccggcagcggctgcggccccagcggacacgtgatggcttcggacggcgccgcgccccgcgccggcctcgcctggtccccctgcagccgccggcagctgctgagcctgctcaggtagcggccgccccgtgggaggggcgcgcgagcctccagccagcccgctgggccgccagcgccacctctctctacgtccgtccccactccgcattcagccctccttcctgtcccacccctccgtccaacccacccctccgtccaaccccgcgcccaccgctccgtccgtggaggggcgggcgcgcgagcctccagccagcccgctgggccgcccgcgccacccctccctacgtccgtccccacctctccctacgtccgtccccactccgcattcagccctccttcctgtcctacctctccatcctgacccactcctccgtccaaccccgcgcccacagctccgtcccatcccgctgcgcccactcctgcgcccacccctccgtcccaacccctgcacccacccccccgtcccacccacctgccccaccccctgcacctccccccgtgctgtcccactctgcggccacccttctgtccaacccctgcgcccaccgctccgttccaccccctccctgcgcccacccctgcgtcctccctcgcccccttgcgcccacactttcgttccagccaatctgggcacgcacccctccgtccatccccatcccgccccttgactccacatacactccctggttctctcccacttgcctacacccacccctgcatcctaccctcctccatccacccctccatctcagccccctgcacccaccccgttcctgggcccaccctgttcctgcacccaccccctcacttcacccccttacccttcgtctgcctccacccgcccctacccctccgtccactctccacgctccatcagtcccacacccctatctcccccacccgcgtacatgtatccctgcgtccccttcccgccgaccgcaccgctcccgggcctaacctgcatctgctccatcccactcagacccgtccctccgtcgccgctccctctgctggccacccacctctgcgccggcaggagccttagtcttggtcccagccaagagccggctcctggtggggggcgcgggccgagaactcctgttcccactcacaaaaggccacgcttccaaacgcttccatcctcgtgcccactcctccgtcccgcctcctcccggtgtacaccccgggactgagccgggcctgagccgggccttgtcgcagcgcaggacgggcgcgctgcgtgtgggacccgccgcggcctcaacccgggtccgcggggcacccgccggatgcgcagcctggcctctactacagcgccaacgagcagtgccgcgtggccttcggccccaaggctgtcgcctgcaccttcgccagggagcacctggtgagtctgccggcggtggcctgggattggctgtgaggtccctccgcatcacccagctcacgtcccccaaaacgtgcatggtgagaacctgctgggtgccgtgctaggctgaggtactaagccagggcggcttagtttaatgctgtctgtgccctctagaaattatttaaaatgtttgaacaaaagctccaacatttttgtttgactgggccccacaaattatgtagctagtcctgggagggcccctgtgcccaaggactcctggctgagtgaggacaccaatcttaaacagttaccaaggacttccccatctattgtggctggagtcagactggagggcttcctggaggaagtggcctctaaactgaacccacagcagaagtggggctggtagggggaggggagatgaaggagagcaggcaccccaaaagacagacttcctcgcaggattgcataggacattcatgggctccaggcacttttgccttgatgggccccttcctccacaaaaaaattgagaattatgttttaatattcttatacaatgtataaagttttatgtgttactataaatacaagtctttttttttcctttttttttttttttttgagacagagtctccctctctgctcactgcaggctccgcctgccagattcacaccattctcctgcctcagcctcccgagtagctgggactacaggcgcccgccaccacgcctggctaattttttgtatttttagtagagacggggtttcactgtgttagccaggatggtctcgatctcctgacctcgtgatccgcccgccctggcctcacaaagtgctgggattacaggcatgagccacagcgccccgccaagtctttttttttaaattattttgagacagggcctcgttctgttgcccagggtggagtgcagtagcacaatcatagctcactgttgcctcaacttcttgggcacaaacgatcctcccacctcggccttggagtagctgggactacaggcacatgccacaatgcccagctaatttttaaattttttgtagagatggggtctccctttgttacccaggcttgtctaggactcctggcttcaagccatcctcccacctcggcgtcccaaagcactgggattacagacatgagccaccacccacgcctgatcagcaaatctattaatattatatattacaacattaattttgacctggaagttcattttttcattttttttttttttttgagacagagtctcactctgtcacccaggctggagtgcagtggcacagtcttggcttactgcaacctccgcctcccaggttcaagtgattcccgggcctacgcctcccgagtagctgggactacaggcatgtgccaccatgcccagctaagttttgtattttttagtagagacagggtttcatcatgttggccgggctggtctcgaattctgacctcaggtgatccgcccgccttggcctcccaaagtgctgggattacaggataagccaccacacccagcctagttcatttttttcttctgattttattttatttatttatttattttgagacggagtctcgctctgtcacccaggctggaatgcagtggctcaatcttggctcactgcaagctctgccttcagggttcaagccattctcctgcatcagcctcccgaatagctgggactacaggtgcctgccaccacacccggctaattttttgtatttttagtagagatggggtttcactgtgttagccaggatggtctcgctctcctgacctcatgatttgcccgcctcggccttccaaattgctgggattacaggcgtgagccacagtgcccggcctttttccttctgattttaaaagaaattaggccaggtgtggtggctcacgcctgtaatcccagcactttgggaagccaaggcaggcggatcacctgaggtcgggagtttgagaccagcctgaccaacatggagaaatgccatctgtgctaaaaatacaaaaaattagccgggcgtggtggcgcatgcctgtaatcccagctactcggaaggctgaggtaggagaattgcttgaacccaggaggcagaggttgaggtgagccaagatcgcgccattgccctccagcctgggcaacaagagcgaaactgtctcaaaaaaaaacaagaaagaaaaagaaattaaaacatttgcctcttgagcttcaagtcagtgacaagttaagaaggaaaaaaagaaaaaagacacaaaaaacacatttccatgggcccccaaaagtgtgacaggacctggtcatggtcccggttccccatcgatgggtcagtcatgccttgtcctctgagggcaccagtgcccacggtgcagagtgttggctgtgtcagtgtgtcctgcagtctgggagggacagttaaggttggacactggcctggaaggccctggtggcccctgagctcgccacccacctgtccaccctcctaggatatgtgccaggccctctcctgccacacagacccgctggaccaaagcagctgcagccgcctcctcgttcctctcctggatgggacagaatgtggcgtggagaaggtcagagccaagagtgaatgagtgggctcctgtgagcacgtgcacgtgggtgcctccagccaggccgccctattcctaggtcaggaggcaggaccagtatggggcagagagtcttggagttggccttggggactgtcctttgggttggtggtctgacctctttcctttagcatttgctcccatgcagaatgggaatgtgggctgcctgttgtatggggggtgcccatgggtgtggggttcctttgggtggggtccctgtgtgaaggtccttgtggatatggggtgtctcggggggatccctgtgtaaggggtccctgtgagtgtagagtccctgtgggtggggtccttatgtgtgtgttggaggatccctgtgtgttgaggggtccctggggggttctgtgtgtatgttggggggtctctgggtgttggaggatccctgtgggtctgggggatccatgtggctggggtacctgtgtgttggggggtctctgtgtgtgttggagatccctgtgtgttgggggatccctatgggtgagttccttgtgtgtgtttgggggtcgctgtgggtggggtccctgtgtgtgttggggatccctgaggatgttgggggactctctgtgtgtgttgggagtcctgtggtggggtcactgtgggatgggagatgaagccatccttgccttgcagtggtgctccaagggtcgctgccgctccctggtggagctgacccccatagcagcagtgcatgggcgctggtctagctggggtccccgaagtccttgctcccgctcctgcggaggaggtgtggtcaccaggaggcggcagtgcaacaaccccaggtaccgcagggagggtgcttttctgtcagggagtgtggccataccatagtccctagttgaaggcagtggtcaccctgctgtctcaccctcctgtctgctgggcattttcagacctgcctttggggggcgtgcatgtgttggtgctgacctccaggccgagatgtgcaacactcaggtaggcctgcttcctggggtaggagggggcagctggtggcaccgggccctgggggagccaaagtgaccatctgtggttcacaccaggacacatttgagaaggacattggggccaggtgaggtggcttatgcctgtaatcccagcactttgggaggccaaggcaggtggatcacctgaggtcaggggttcaagaccagcctggccaacatggtgaaatctcgtctctacagaaaatacaaaaattagccgggcgtggtggtgggcgcctgtagtcccagctactcgggaagctgaggcaggagaatcacttgaacccaggaggtagagcttgcagtgagccgagattgggccattgcactccagcctgggcgacagagtgagactctgtctcaaaaaaaaaataaaaattaaaaaagagagagaaggacattgggaccccagttcataaaccaggccagtcctgctgatgcccacagagcccctgaagcgtcccgcctccctccctgagtgccactttgccctccagagcgcatctctgcagggagaacctccccactaggaatacagtgcgctgctgcatgcctgcaaaggaattttttaaatattatttttatttttttagacagagtctctccctgtcacccagactggagtgcagtggtgctatctcagctcactgcaacctctgcctcccaggttcaagcgattctcctgcctcagtctcctgagtagctgggactacaggtgcccgccaccacgcccggctaattttttgtatttttagtagaggaggggtttcaccgtgttagccaggatggccttgatctcctgacctcgtgatccgcctgcctcggcctcccaaagtgctgggattacaggtgtcactgcgcctggccgaaggagtcttttatttataaattgaggtgacattcatgtagcatgaaatcaagcattttaaagtggcaactcagtggcctttagtacactcacaaggttgggcaagtactgcctctgtctagtttcagaacgtttccagtactctggagtactctggagtgaaccccatatggtaggctgtcactccccatttctcctccgccactcagcggccattggtttcccttctgtctctgtggattgacctgttctagacatgccacgtacctgaggccagacaacaggtgtgcttcctgcctgccttcctcccccagcggcacgtccccaaggctcacctgtgttgtagcctgtgtcagcgcctcattcctctttctggctgaatcatattccactgcagggatagaccacattttcatccagtcgtctgctgatggacatctgaggtgttttcaccttttggctcctgtgaacagagccgctgccaatgtgcttgtacatgtttgaatccctgttttcaattcttttggcagtatgctgaagagcggagttactggatcgtatgggaattgtatgtttgacttttttttttcttttttttttttttgagacagagtcttgctctgtcgccaggctggagtgcagtggtgcaatctcagctccctgcaaccttcgcctcctgggttcaagcgattcccctgcctcaccttccggagtagctgggattacaggcacgcgccaccatgcctggctaattttttgtatttttagtagagatggagtttccaccacgtcagccaggatggtctggatctcctgacctcaggtgatctgcccgccttggcctcccaaactgttgggattacaggcatgagccaccgctcccggcctatgtttgactttttttttttcttatttttttctttctttctttatttttttttttttagagatggagtctcgctctgtcgcccaagctggagtgcggtggcgcgatctcggctcactctaagctccgcctcccaggttcaccccattctcctgcctcagcttcccgaatagctgggactacagacgcccgccaccacgcccggctaatttttttttgtatttttagtagaggcggggtttcaccatgttagccgggatggtcttgatctcctgacctcgtgatctgcctgcctcggcctcccaaagggctgagatcacaggcgtgagccaccgcgcccagcatgtttggcttttaaagaaactgccaaaccgttttccacagtgcctgaactgtttcacattcccaccagcattgcgccagggttccagtttccccacatccgctgcagcacttgctgttttctgttgttgttttttcttttctcttcttttttttttttttttttttaatagagatggggttttgtcatgttggccaggctggtcttgaactccgaccccaggtgatccgcccaccttagcctcccaaagtgctgggattacacgtgtgagccatggcgcccggcctgttttctgttttttgattttggccatctcggtggtatgaaatggtagaaagattctttttacattgagttaaattctatctcctgcttcgatggccctgggtgtgggtttgtccctggctgtattacagttctgcatgtggtgagaccctccctttcctccttctccaaatggaccaccaagacctccccagaccgtgaggggagggtctttggctggagcacagggtggtgggatttcgtggaggcagtgtggtcagtgtggctgtccagggagtcaactccggttatcttctgtcagcccataaaagtccaagacgcctgcctgagtgcagaggcttcggtggtgaggtctttgctccatgctttggttacctgcctctaggtgcactacctaaagaatacacatccccgtccctgttttattgagttcaggccttggaagcagaggctctgagcgtaatgctctttcctggctttcttcttcgttgctgccctgtgttctttacggattccccggggttttcccatcaatagagagaggcaggcacttttgtcaccccagtttacagagcagggaaccgaggcacggcctggagctgaggccacacccacatcttgatcctgtactgtagggtgccatgtagtctcccagtgacaacacccgccccccgccccaccgccatccccctcctctgcctcctcctggccaggcctgcgagaagacccagctggagttcatgtcgcaacagtgcgccaggaccgacggccagccgctgcgctcctcccctggcggcgcctccttctaccactggggtgctgctgtaccacacagccaaggtggggcctgcggagtgtggggttgggggaggagccagccctggagaccctcggacagggcagagtcataggggggttggcctactatccctccagcactgggcaaagtggttcaggctctggcatcccacagaccatggatgacatagtggccaggcctcgctggtagatcaggcactgacatcccatctctgagtctcaatttcccatctgtgaaatggagataatagcagtaggtccctccctgggcgctacaaggattcagggagataatcggaaaatgccaagtgtgttccttggttcatgatactttttttgtgagacagagtcttgctctgtcgcccaggctggagtgcaggggcgtaatctcagctcactgtaacctccgcctctgggattcaagggattcttgcccctcagcctctcgaatagctgggactacaggcttgcactaccatgccggctaatttttttgtatttttagtagagatggggtttcgccatgttggctaggctggtttcaaactcctgacgtcaggtgatccgcctgcctcggcttcccaaagttctgggattacaggcatgaaccattgcgcccagccttggttcctaattcaataccattaattattagattagattaggatcgtgattaggattattgccttaggaggtgggatgtggggaagatagaaacccttgccccagatgcaaaggatgaagctgggtgggggctgggggacttgcccctcctgctcggttcaggacaccctttttcactctgccctcccaggggatgctctgtgcagacacatgtgccgggccattggcgagagcttcatcatgaagcgtggagacagcttcctcgatgggacccggtgtatgccaagtggcccccgggaggacgggaccctgagcctgtgtgtgtcgggcagctgcagggtaggcgtgtgtggacattggcgatggccctggggcctacctgtcctatcggaaggctcctgggggcaggttggtgggtgctggccctgatggagctgcagtgccctctgcaggggagtggtgctggggaaaaggatctggacttggagtcagcctgggttaagggctgcagtgtgaccttgggcaagtcactgagccctctaagcttgcttcctgtgtagatggtggggtgctatagaagtgttgctggttttgtggatcccagaatctcagagctggcagggctgcagagtcattgaggccagcaccctccagtgacacgggccctctgtccttccctttgcatagacatttggctgtgatggtaggatggactcccagcaggtatgggacaggtgccaggtgtgtggtggggacaacagcacgtgcagcccacggaagggctctttcacagctggcagagcgagaggtaggcggcctccctcggggcagaggctgggcttcccccagcctccaagatggccacagcccagagcgttggtgcaggggctgctcaggtcacagggcctgcacactcactcagccctggatgcctcctgtggtgtcagcgtctccctcttccacttcgccacccttctgtggcaggctcaggttttggccttgatgctgctgggactgtggtgcctcagtaatggtcactcactgtagccgtgctgcaaaaaaaacacagacattggccgggcgctgtgctcacgcctgtactcccggcactttgggaggctgaggcgggtggatcacctgtagtcgggagatcacctacagcctggccagtatggtgaaaccccatctctactaaaaatacaaaaattagctgggcatgatggcgggcgcctgtagtcctagctactcaggaggctgaggcaggagaattgcttgaacccaggaggcagaggttgcagtgagccgagatccctctgcactccagcccgggcaacagagtgagacactgtctcaaaaaaaaaaaaaaaaaaagtatggacgttgtgcattctgtggcagctaccctcttctctcctgctcaagaaatcccactgagagggacacaagtgaatgagagggatggtagttacatttggaaaatctttgactttggtgtatatatgaggtcaaaaaccatttgcaaatgccagtgcttctatggagagcagagacttgagccctgcctccctctggcttgccccactgtgctggagaaccttggacccggtcccttctcccagccagggcagagccttggcaggtggtcctccagcctgcttttaattgcccccatgacaggggactcactgctgctggagccagccccatggcattgttcaatttttcccgaccagctaagatcagctccctttgtctgtggtgtggtggctgtgaggtccacgcatctctccttcttttcttctttctagaatatgtcacatttctgacagttacccccaacctgaccagtgtctacattgccaaccacaggcctctcttcacacacttgggtgagttgactggaggactcccacccagttagctagactgcaaaggtgcagagcactgttgccaagatgccctcacttctgacatcacccgcaagttcagggggttccccaaaccaccctcaggcttgatagttgactaggaagactcccagagctcactgagagctgtggcacatggctgcggctccttccagaagaacacaggttagaattgtccaagggaagagatgtaggcagagtctgggagggtccaaccaggaggcctgatgtctcagggatgtgacacccttctagcattggagcgtggccatacgcatggagtattgcccacacagaaagcccactgagtgggagttgagagtttttcctggggtttgagtgcaaagacatgattgactaattggccaggtggatactctcagtctcttggtgacccagcccctatcctaaatcacatagttggtctttctggtacagccagcccctgccctaaaggaggacacttctgcctggtgtgacccgtgtttcctcttggaagccaacagcaaaagctggacttctctttgggcaaggcccgcttctttgctattgagggccacagtgggtctttctggagtgtgtctgcacctaacctttgaagccttggttgccggcacttgccatggggtccctgagccctgagcctgttgagttctgtgcgtgagtgcacttggtcatagcactcaccaggttgtggaaagaggcctagagcctccgctgtggggaagcctctagctcagatgcctgtggctccttagaggagggctggggaccccgggaaggagagtcactgacatgtgcctgtgaggaggatgggtgctcagctccacacggctaacagggctggttccccgacagcggtgaggatcggagggcgctatgtcgtggctgggaagatgagcatctcccctaacaccacctacccctccctcctggaggatggtcgtgtcgagtacagagtggccctcaccgaggaccggctgccccgcctggaggagatccgcatctggggacccctccaggaagatgctgacatccaggtcagcaggagagcctgggggaggccagtgggggcttcttcttgggggctatggctgcttgctcgtttgtctatccatccattccctgattcgttcatttattcattcagcggtcacttacaggggacccactatgtgttgggccctgtgctaggcaaaatgtagctagctcctccaggggcttagggtcccacaaatatccaaatgtgtctgtgcccagagcccgtgggagaaggccctgcagttctgggatcaggtaaggttggagggcccaatgcaggggtccagggctccctgggaaagagtgatggagctgaggtgtcagatgagcagatgttgctgggccaagcagggaaggaagcgtatggctgagggaacagtgtcagtgtgggagggatgaaggaaggtcctactgtgtgggtttgtggggagatgaaggcatggacgcaggtgcagtggcatctggggagtaggccttggtgctgaggaagctgagaacagatgctggctctcactgcttctttggtgcagtgtgtgtgggaaccggaaggccttgttcaggcgtgtcctcagtgacgtgtgctcgcccatgtatgtccccattggtgcttcgctgaggaaggcacgtggagggtggagagacataagcgcaggctgaaacagacctgagaaccttgggagaggggcccagtctcagcggccggagcagcgtcctctgcccctacagcagccagagacaggagggcctcccacagatcaggccaggccgggccaaagcaagcccctgtgagcggcttatcccttctcttcccctgatatggttcccttcctcccctccccttgcctgggacattgtatccagatgctagctgccgagtggctctcccatcatcctctgcagtgtgtaaaaaagcagattcccgggtcctctgcatattccctgaatcaggacttccctgtgttgggcctgagaaaccgcaccgtaaccaacacaggcttgcggcactggccagatgtgggcatcgagggggcaggtgcggaatgtcacctcgccctgggctctggccttcaggctggcctctttcttgggctggtcttgggcacaggacccagttaccctcctgaagagccttaggcccaggaacctgctgaagttcttcctagtgctctccgggccagtcccaagccagtagctggccacaggtccccagggatccagtttcttcctgccgaccctaccacaggtccccagggatccagtttcttcctgccgaccctacgggcctcagctctggctccagaagcactttctgtgctggccctgccctagcccttcttgggctccttagcccagcctaaggtgggcctgcctcctccactgcactttatcctctacccagccagcttagggaaccttctctgtgctgcccaaataccctatcatgtaacccaccaatgacttggtaattacctccccgagccctctatcccaacccactgagagctccttgcagctcagccagtgtcctgtgcactgtgctatccccagagcctggtacaggtcagtgttggtgattgcttcccgttatttttgtctttgttgtttttttagagagggtctcactgttggccaggctggagtgctatgttgcccaggctgctctgaaactcctgggctcaagtgatctgcctgcctcaggctcccaaagttttgggtttacaggcatgagctaccgtgcctggccagtgattgcttgctgaacgaaagattatagggatgcaagaagaagttggaaggcttcccaggggaggtggccatgacagtgaccctcagggaacccactggacaaggcctgaagctctttgtctgcaggtttacaggcggtatggcgaggagtatggcaacctcacccgcccagacatcaccttcacctacttccagcctaagccacggcaggcctgggtgtgggccgctgtgcgtgggccctgctcggtgagctgtggggcaggtgagacctggggaaggctcatccacagcacggcttgcccctgcagggaggcggcctagccctccctcttccctcccagggctgcgctgggtaaactacagctgcctggaccaggccaggaaggagttggtggagactgtccagtgccaagggagccagcagccaccagcgtggccagaggcctgcgtgctcgaaccctgccctccctagtgagtgtggtgctgtctgcgcagctccaagggggagagagggttccgctggggctgctgggctctgtccctggcctatggggcccatgtggcagggccgggctgagctgctcctgtgcaggctctcattacccctgcccacagccctgcaaggggggctctgtgagtgcccccattctgcaggtgaggacactgaggcttggggcagacatggtgacaatgtcagcccagtgggacccacacctgctgccaccttgtctgggccaccgaggcctctcttgagctcaggtactcatggtgagatggaggtgattgcctacctggagggttgtagggagacttgcggagctcctggtgcaaagcccctggctgtcaccacacctgacggggcacactgttagggacgaggccattcctgctgggtgcaggacagggcagctgctcaccagcctgtgattcggttgtcctcaggctcagccgtctggcagcctgggaacacctggagaggctaggctggccgtagtgcccattgcttgtcccagaccgggggagtacatcagcacctgccaccccatcaccccaggccagcctgggacctggccagggtcccgacgctctgtctccttcctcagctgggcggtgggagacttcggcccatgcagcgcctcctgtgggggcggcctgcgggagcggccagtgcgctgcgtggaggcccagggcagcctcctgaagacattgcccccagcccggtgcagagcaggggcccagcagccagctgtggcgctggaaacctgcaacccccagccctgccctgccaggtgagcccagggctaggtggggctgggagagggccttcctggcagagctcgtccctgcgctgagcccccatccttctgagaatcccctcctcctgaggcctccggcggggcctcaccatccagggtgatgggcagtgtcacctggcggttgtaagtgctgctgtcagagttccttactacccaggagagcctgggcccattgtttccctctctgagcttccgagcccctgctctgaaatggggatgccgacctgcctggggagggggggcttcgaggatgaggtcaaactgaacggagtgggagatgtcactttctcatcaccaccatctcccccgtgcccacgtggctgcatctcatcccctcagtgtccaagttgacagtggcttatcatcctgccctgccactaacgagctgagtgacagggcaagtcccctcctctgtgggcttcagttttgcgacctgtccggtgggaggggattggtctggattgttggtggcccactcatagctctggactcctttccccgcctcgtcatccgtggcagacaaaacagtcaccactcttccccgctgaggccagatagggcctcagaatccttctcacacagctctccaggcagccactttagcgcagggctgactcacagctgaaacccattggccacccttgaacctggtgatccaattccatgtggcacctgtttctctgcacctgctatggtgcatggagtcagtgattacctggctggaggtcggcctctgcctctggagagtaggagggatgggttctcttttttttttttattaaaagacagagtcttgttctctcacccaggctggtatgcagtggcatgatcttggctcactgcaacctcctgcctcagcaagtgtgcgccaccaagcccaactaatttttgtattttttgtagaaacagggttttgccatgttgcccaggctggtctccaactcccgggctcaagcagtctgctcacctcagcctcctaaagtgctgagctaccgtgcctggccagggataggttctgtctctgcaccctgggtgcaggtggggtgcctgactgttgagcagcgagtgcttgttgaatgggaacctgctggctgatgaatggggaacccggtgcttcagggagagaccctgagcttcacttctctgtggggctcctctttgggctcctggatgttggggagcaggtccccttcctccctgcccctagcagctgggctataccttcccctgggtggcagaggcagggcctgatgactgtctcatgccatcctcaggtgggaggtgtcagagcccagctcatgcacatcagctggtggagcaggcctggccttggagaacgagacctgtgtgccaggggcagatggcctggaggctccagtgactgaggggcctggctccgtagatgagaagctgcctgcccctgagccctgtgtcgggatgtcatgtcctccaggctggggccatgtgagtgccctgggcatgagggtggctggggctgttgagtcctttacctggctgggagaacgaggagcacccattgccaccgtcctccaggccagagcaagaacaccatccttctgtgggaatgctgtctgagggccacccctgctcagaaaagaagcttagaaagagggctcagggcccctgggaaggctcccattccccttgcaagccgggctgagggaagcatctgaggagagtgtaatgcagctgctgtgcagagaaatgctgccaggctcccgcctggcgtccaggggctggaggctgactggccttgctctctggcctgggtgctggcaaccctcgcccctcatggctggggggattgcagggccaggcatgctcccatgtcccactcttggtccccagctctcggccaggcccacagtgagcactcatgctgctgaggagcctgcaaaggtggggtgtgcagcaaggatacccgctgcgagaccggggagccgatctcgccaagggaggaggggagggagcccctggtgcacacacgccacttcctggtctctctgctgctgcctgagaagatcgagacggggatcgctgggtcctcagaggaggcccagacccaccagcttgttgctattccccacagctggatgccacctctgcaggggagaaggctccctccccatggggcagcatcaggacgggggctcaagctgcacacgtgtggacccctgcggcagggtcgtgctccgtctcctgcgggcgaggtgagggcccccgggatgctcctggggaccagcactcatggtaactctcctgtccacttgcatcttgcctcgttctgaaaagcatttgaggtggattgcagaaaatccagactatatgggaacacgtggtaatacacaaggagactaagcatagtagctgacagccacttcaaatgtgggtgttgattggctgaaaggtaggaaaagacaataacgcccggcagtgtggcacgagagccattccttatggtcctagcagagcggccggggggtccccaattgatgacccgagcagagaaaccttagctttaagatacacagcgttcttctattttcccaatcttgttttattgcagtataacacagatattataaaatttaccatccaaactgtttctccctgtgcaggtcagtggcataaaagcacagtcacattgttgtgcggccatcaccaccaacctctccagaacttttccagtttcgcaaactggagctctgtccctgtgaaacacgaactcccatttccccctccgcagcccctggcaacctccattctcctttctgtctccagattccacaattctagggaccttgtagaagtggaatcatatagcatttgcctttttgttactagttttcactcagcatgatgtcctcacagttcatccatgttgtagcatgtgtgagtgtttccttcttaaggctgaaaaagattccattgtgagtgtatcctttacaggtttatccatttattcatcagtggacacttggcttccttccacactttggctattgtgaataatgcttctgtgaacatgggtgtgcaaatatctgtttgagttcctgctttcagttcttttgggtgtatatctagaagtgtggtagctgggtaagatgagaattctatgtttaatttttgtggaactgctggactgttttccccagtggctgcaccattttacatttccactaatggtgcataagagttccaatgtcctcccatccttgccaacactttttatttctatggttttttttgtttttgtttttgtttttgagacagagtctcattctgttgccgaggctggagtgcagtggcatgatcttggctcattgtaaccttcgcctccggggctcaagtgattctcgtgcttcagcctcccgagtagctaggactacaggcgtctgccaccatgcctggctaattttttgtttagtagagatggggtttcaccatgttggccaggctggtcccaaactcttgacctcaggtgatctgcctgccttggcctcccaacgtgctgggattacaggcgtgagcccccacacctggcctatttctgtgttttttttataatggccatcctaatgggcttgagaagacacaccatgttcttaaacgaaaaccctgaccacttgctcagtaaaatgtcagcctgtttaaaaccgagaccaaaaagagatttctttttctctcttttcttttttgagacaaaaaagaaaacctctgtcaccaggttggagtgtagtggcacaatcttagctcactacaacctccaccacctgggctgaagccatcctcccccctcagcctcctgaatagctactataccctgctaatttttgtagttttggcagagatgggatctccctatgttgcccagcctgatctcctgagctcaagcgatccttctgcctcggcctctcaaagtgctgggattataggcatgagccactgtgcccaaccaagagattttttttctttttcttttttttcttttttttgagactaagagttttcctctgtcgcccaggctgaagtgcagtggtgtgatcttggctcactgcaacctccgcctcccatgttcaaacgattctcatgcctcagcctcctgagcagctgggactccagctatgtgccaccacacctggctaattttttgtattttattttatcagagagggggtttcgccatgatggccacgctggtctcaaactcctgacctcaggtgatccacccgccttggcctcccaaagtgctgggattacaggcatgagccactgagcctatttcttttgaggatattcctaaaagagagacttgagaaaactggccctaataacatctttatgatagacacaatcagagattttcatattgtgatttttttttcttttttttttttttgagatggagtctcgctctgtcacccaggctggagtccagtggcgcagtcttggctcactgcaacctctgcctcctgggttcaagtgattctccgtctcagcctcctgagtagctgggattacaggtgcgcaccaccacgctcagctaatttttgtatttttagtagagacggggtttcaccatgttggtcaggctcgtctcgaactcctgaccttgtgatccgccgcccaaagtgctgtgattacaggcgtgagccactgtgcctggcccatattgcaattcttataatgcctctcggtcaacaataacagctaccatttgtcaagtgtctactgtgtgccaggcacttgttatcttcccttttaaaaatctttataaatgattctgcaaggtagatgccattatctttttttctaaatctaagattcagagggttaagtcagttgtctgaggtcacacagctggtaagtggcagagccgggattgaaacccatgcgggccttatgtgctagaggtgtccagtgagcctgggctgcagtccttgctgagcctgtcccttggggctctgggtctctgctttgtccacgcaggtctgatggagctgcgtttcctgtgcatggactctgccctcagggtgcctgtccaggaagagctgtgtggcctggcaagcaagcctgggagccggcgggaggtctgccaggctgtcccgtgccctgctcggtgagtgaggggagcaagactgtgtgctggccttctccctgtaagtgggagacccgagccttggctccatgcccggtgacctgcggaggggggcaggtgctgctggctgtgcactgtgtgaggctggaccatggccgccccatccccctgcctcactccaagtgcaggccagagccccggcccagcccctttgaggactgcaacccagagccctgccctgccaggtgggccccttcccaaggagacagggggtgctaggtctgcatcctggctctttcctcacctccaagccagaccttttgaccctcagtgtcctcaccagtgggagcaggtcattttgtgcccccagaagactgggggagtttaatgaaaggattagatgcatgtaaagtacatgctaaatgcaatgagtgtaaaatgcatgctcgatgcaacgcgtgtaaagtacattgcacaggatctgggatgctgtgggtgcacatggttgctggtgcgtttcttcatcgcctgctctttatggagcacctaggccccggggccgtcctggagctaggggacacagcagagaacaaggcagacaaatgtccctgacctcctggagcaaatgcagggggaaagggggacagataataataggacaggcggggaatgcagtttgatggatggtgttcagtgcgatgcagccaaacacagcgggaggggaggaggggagggctggcggggtgggctccagggcggtggtgctgggatcactgttgaagacagacatgcagggcccttgggtgcccggacccctgcccccactgtctctgggatacgacatctgtcgtttgccctcacctttctcttctgtaaaatgggtttgtccaaatgttctgtccactctgccaagcctcttggtgaggacacaagggggcctccagaaagagaacctctccgggcccttcccagcttcctgtctcttcctagtctggggaaatgaaggggagacctggctcccctgggttcccaggccctggggctgtttggggtccctgactccagtttgctccaggtggcagtacaagctggcggcctgcagcgtgagctgtgggagaggggtcgtgcggaggatcctgtattgtgcccgggcccatggggaggacgatggtgaggagatcctgttggacacccagtgccaggggctgcctcgcccggaaccccaggaggcctgcagcctggagccctgcccacctaggtgagtcagccggtgatgggaggggcagctcctggtgtgtgcagatgccaggccaggcgctgtggtgtgtgcctgtaatcgcagctacttggaaagctgaatcaggagaaccacttgagtccaggagtgcaagtccaacctgggcaacacagtgagacctcatctctaaaaaaaaaacaagacggggccaggtgtggtggctcacgcctgtaatcccagcgctatggaaggctgaagcgggtggattacctgaggtcaggagcttgagaccagcctggccaacatggtgaaaccccatctttactaaaaatacaacaattaggctgggcgcggtggctcactcctgtaatcccagcactttgggaggctgaggcgggcagatcacctgaggttgggagttcgagaccagcctgtccaacatacagaaaccctgtctctactaaaaatacaaaattagccgggtgtggtggtacatgcctgtaatcccagttacttgggaggctgaggcagaatcgcttgaaccggggaggccaaggttgtggtgagccaagattacgccactggactccagcctggctaacagcagcaaaactccatctcaaaaaaaaaaaaaaaaaaagaaaacccacaaaaattagcctggcgtggtggtgtgcacctgtcatcccagctacttcagaggcggaggcaggagaatcgcttgaacccgggaggcggaggttgcagtgagccgagatggcgccgctggcactccagcctgggctacagagcgagactccgtctcaaaaacaaaacaacaaaacaaaacaagacggggtggggggctcagtggcccaagagccagtctgtaaggaatagggctacctggcaggctgtgctagttgtgggaggtgaagtttaagcaccatgcaggcagggtgcagtgtggggaggcctgggggacagaggaggcagcatttgagcagaacctaaagctgtgagcaccagcattctgatgtggaagacgggagggatggaggtctccacagggacacacacagccacactaggacacgggacagaatcatgttcaagtccgtggggtccggagcccagtggtaaagggcgaacatttgcctacctcatttacaattctttaatggtttctttttgtaggtttgcatttttagtaaagaaatacttttctatatcatacagaaacgtccagaaaagaatgtaacagacatgtatgttccagcactccagtttaatagatagcatcctactgccatgtttccttcctgtccacttacttttatttatttaatttatttattttgagacggagtctcgctttgttgcccaggcagtgatgcaatcttggctcactgcaacctccgcctcccgggttcaagccattctcctgtctcagcctcccaagtagctgggaatacaggcacccacaaccacacccagctaacttttgtatttttagtagagacagggtttcaccatattggtcaggccgatcttgaactcctgacctcaggagatctgcctacctcagcattccaaagtgctgggattacagatgtgagccatcacacctggccagcctccttagttttaaataaatccagttacagataagatttcacttaaatttaggctggtcatggctcacgcctgtaatctcagcacttcaggaggctgagatgggtggatcatttgagcccaggagtttgagaccagcctggacaacatgccaaaaccttgtctctactataaatacaaaaattagccgggcatggtggtgcatgccagtatccccagctactcgggaggctgaggcaggagaatcacctgaaccttgggaggtcaaggctgcagtgagcagagatcacaccaccactgcatgccagcctgggcaacagcatgagaccctgtctcaaaaaaaaaaaaaaaaaaaaaaagattttacttaaatttaaaccctgtactaatctgtgatttatttggagtatgttgcaaagtagggaccaaaggatttttttttttttctaaattgttaactagcatctgttggacaagccctgatgcctccaggtggctccttggtggtattggtgtgtgttagaatctatgtctgggctttctactgggtttttttcttctccttttttttttttgagacagtttttctctgtcacccagggtggggtgcagtggcgcgatctcagctcactgcaacctccgcctcctgggttcaagtgattttcatgcctcagcttcccgagtagctgggattacaggtgcccgccaccacccccaactgattttgtgtttttaatagagacagggtttcactatgttggccaggctggtcttgaactcctgacctcaagtgatctgccaggttctgttttttgtgctttttttttctagctattctcttgcccatacaaaattgttttaaatgttgtagctttataaccatttaacatctgtgtcactagtgtgtcctgatttctttgcctatgctaaagtcccttggctgtgtgtcccatttatttttccacatcacatttagagatgatctgggattttatgggaattgcagggtttttcacactgcacgctgcctgcatggtgcttaaacttcacctcccacacctagcacagcctaccaggtagccctgttctctacagaccacctcttgggccactgagcctcccctcacttttttttagagatggggtctcactatgttgcccagtctggacttgaattcctgggctcaagtgatcctcctgcttcagcctcccgagtagctgggatgcaggcacacactacatgagctctggccatccctctgacgttgctgtagccacgctggcctcattgtcctggaacattccagggatactcccctgacttagggcttctgtgctagctctcgctgcctgatgtcttctgtggatatcctcgaggccctggatatccctcccccaggctcggctcagacaccacaactccaaagtggcccagtgccctccctgagcgtcggtccagaacggcactctcgtccctcctgtgacgctctgcttggcactttgggaggctgaggcgggaggattgcttgagcccaggagttctagaccagcctgggcaacatagtgagaccccgtctctacaaaaaatacaaaaattggctgtgcgcggtggcttatgcctgtaatcccagcactttgggaggcgaaggcgggcagatcacgaggtcaggagatcgagaccatcctggctaacacggtgaaaccctgtctctactaaaaatacaaaaaattagctgggtgtagtggtgggtgcctgtagtcccagctacttgggaggctgaggcaggagaatgacgtgaacccaggaggcggagcttgcagtgagctgagattgtgctactgcactccagcctgggtggttgcagtgagctgagattgtgccactgcactccagcctgggcgatgagtgagactccatctcaaaaacaaaaacaaacaaacaaaaattacaaaaattagccaggcatgatggcacatgcctgtagtctcagctacttgggaggctgaggtgagaggatggcttgaaccctggaggttgaggctgcagtgagccgtgatcacaccactgccctccagcctgggtgacagggcgagaccgtgtctcaaagaaaaccattaaaataaaataaaaaataaaatttctgcgatgcacacgacagcctccacagcaaatcagcatccagttgctcatgccagtgatgccccaatggagaacaatccacgctctgagaggaggtggggtctggtttggttcactgccacctcccagtgtcatgtagaacagtgccaagccgcggaaggcacgggtccaagaggcagcgctgcagggtcatgggggagcacagtattgcgatgaagatcccagctcccttgcaggctgcctgggtttgtgtctgggctctgaagaatgcgggccataattagttattgattgattacagatcaacatgggcagccttcccttgcccaagggaagggaactcggccttcccttgcagaacgtggggtgttgagatctgtctcctgttacccaggggctcgcttcctgttgctgttacttgggtccataggcaacccctggggtgctgacaggtgttctgtgataaaggcgactagagggggatgtgcaattagggaaacaggggcctcttccccctagggccttttggtagctctcctgtggccgtgagccctggccccagacaggaggggctcagtggctgcactttccatcttgcctggccacggaagctgtctaggcaactgtccgagtacacgtgggtggagaggggcctgcgtggggcagtactgtctctggggagacctagcctctctctggggtcttctcttcctgcaggtggaaagtcatgtcccttggcccatgttcggccagctgtggccttggcactgctagacgctcggtggcctgtgtgcagctcgaccaaggccaggacgtggaggtggacgaggcggcctgtgcggcgctggtgcggcccgaggccagtgtcccctgtctcattgccgactgcacctaccgctggcatgttggcacctggatggaggtgagcacagcgggcactcggaatccctatggggctggggtgggcatcagctgtggctcctcatgtgtgagggagtctaggaggcattggctcatcgtgtcccctgaaaggaaggagagagctgcgcccgttggtgagggggcacctagaggcagagagacagagggcctagagacctgcgggcagctaggacttaagaggcccttaggtttggggacgctggaagatgaatggcaggccactcagctctacacagatgagggaatgccagctgtgccacgcacctggcaaggcaggacagacaagggtaaatggggttcaggctgccccctggaggggctcgctcatggtgtggagggggcataggggcacagcagacagagatgagccgcagccccgcagacctgcttgctctaaggcttggagggacagagaggccgtgagggtgacagggacccagacttgaattatggctcctcccacctatatgacccatgcaaggtgccctctctgagcctcagttttctcatctgtggaatggagacacttaactgcctcccagcttgtacaaggattatattggatcactcctggcctgtggttaccactgtccttgtcaccttctggcagggtcagctgtgactcctcctcccctctcttggcagtgctctgtttcctgtggggatggcatccagcgccggcgtgacacctgcctcggaccccaggcccaggcgcctgtgccagctgatttctgccagcacttgcccaagccggtgactgtgcgtggctgctgggctgggccctgtgtgggacagggtacgcccagcctggtgccccacgaagaagccgctgctccaggacggaccacagccacccctgctggtgcctccctggagtggtcccaggcccggggcctgctcttctccccggctccccagcctcggcggctcctgcccgggccccaggaaaactcagtgcagtccagttatgtcctgtcctccttcctgtcaggcagctgctgcaggaggggtgggcaaaggcatcttcctctgggaaggactggcacaagcacttggtccctgggttgtgtgcctgggaggccgggatcagggctggccctctttctccctggcaaagcaaaacctcccttttactactatcaaggggaagtaacttgaaggtaggaacccagcttgtgagccccctagcctctgggctgctctgcatgtgccccctcttgctggatcatctggtagcagccctgtgccctgagggtgatgctctgacctatgcagcccccctccctgtcctgagaaggcttccagctgggccttggaggacagggtccacccctacctcctggtctccttcctcagcttggaagccccggagcctgccctgctgggaatcggggaagcactgcttacctgtctcctgctcccttttcaggtgcctgtggcaggcagcaccttgagccaacaggaaccattgacatgcgaggcccagggcaggcagactgtgcagtggccattgggcggcccctcggggaggtggtgaccctccgcgtccttgagagttctctcaactgcagtgcgggtatgtctagggccatgcaagcgatgctgccagttatgggccctgccaggagccagcacgacgctgcatgccccattcctggcaggagcccatgtgcattcccacctgtagtttgcatcccatctcatgactggggagtgatgatctgcattttacagatgaggaaactgaggctaggagagattaagtgatgtgcccagttacttagagtcacatagccagcagtgggagaggtgggacttgaactcggctcagtctaccctggagccactcctctgctgaccaggcgtgggagtgctggaccctcactgccctgccgcttcctaggggacatgttgctgctttggggccggctcacctggaggaagatgtgcaggaagctgttggacatgactttcagctccaagaccaacacgctggtggtgaggcagcgctgcgggcggccaggaggtggggtgctgctgcggtatgggagccagcttgctcctgaaaccttctacagaggtatggccaggccttctccacctcccttgggtgctccagtcctggcagggaggctgggtgggtgctgctggggatggggccagtcccagtggggcagtgggaagatacggagggaactgactgagatggaaggaactggggttggccagtgtcagtctgcacgtgccagggaggggtcacaggatgaatgctatatccctcctttttgggaccgtgcagcaagatggacggatgtgggacatggtccacatcctcagtcagtccctcaggcctctgccccacacccacctgccccgcccccacccctccagcctttcaagggcttttagggttttgtggaagccactgtccctcagccctgtttcagtgcactggtgtaagcagacatgcttgtacatgcatgtgcacccacaagcacacctcaggcagaggatgccacctcagggactccagccttgcccgtggccccctcgatatcctctgatagccctctcggttgtcctggggggcttgccctctcccaacagcccgagctggccgaagttggcttccctagctggttccagaggttcctcggctcccccaggtgtctggggcttagtggcaacaggggcttagcctctgcagagacctagtgcgccgcctccttgccccagacctgcccgggcagagagccgtgtatgtgtcccagtgcacaggcgctgctgggccctgccaaaaggccacaagcccactgtcaccgttcacattgcttctcgcttcccggcccagccccgcccacacaggcatctgccttgaaagaggtgcaggaggtacaggcaggtgggggctccagtgagctctgaggaacagcagtggccgccatgggtggagcctatctttgttgccagtttcagtgttaaacactcttgcacgtgtgacatcattgagtcctaaagaccactctgctcagtgcatgccattgtttccttcagttacagaggagggaaccagagcccagaacatttagcctttgcctaaagtcactgggccaggaagtggtagaggtggggttcagcaggatttgcctgggaaccccaatattgaccacagtgccatgctgccctgcacggctccctggctgtgagttgtcctggcctctggcaccaccggtctgtctgggttcctatgtccctatgtcccacctgcagaatgtgacatgcagctctttgggccctggggtgaaatcgtgagcccctcgctgagtccagccacgagtaatgcagggggctgccggctcttcattaatgtggctccgcacgcacggattgccatccatgccctggccaccaacatgggcgctgggaccgagggagccaatgccagctacatcttggtgaggcccagcatggggacttgtgctgtgattctggacagctttccctagggcgtgcagggctaggggacccccttcagtttatttcagactaaaaccctcaaaatcattagtgaaagaatgggagaagatagcttcctccacatattcaccaagaaatgttttttgagctacctacaagagtgaaatagtggctcacaactgtaatcccagcactttgggaggcccaggagggcagatcactcaaggtcaggagttcgagaccagcctggccaacatgatgaaaccttgtctctactaaaaatagaaaaagtagccaggcatggtggcgtgtgcctgtaatcccagctacttgggaggctgaggcacaagaatcacttgaacccgggaggtggaggttgcactaagcccagatcgcaccactgcactccagcctgggcaacagagtgagactctgtctcaaaaaaaaaaaaaaaaaaaaagcgaaatggtaaagaatggtaaagacctttctgatgtagactgacagctaacccaagactgaagcataattttacagtctgatataacttggacagaatagcaccctgcaccctccccgaggtttcaagtgtcctgggagaactgtgttctgcagggtatcagcttccccagaggaggcagcctggccccgctctggcaccctgactgtgtgtccttggggaagtgatgtaacgtccctggacctcggttttctgggtagagtaatggcgtattcctagtagggctttgtaagcattaaatgtgatccggaatctgtgagcccttgcacacgaaggcttccgtgagtgctaattattacttgtggccggtccttctgggctgccccttttctctcagatccgggacacccacagcttgaggaccacagcgttccatgggcagcaggtgctctactgggagtcagagagcagccaggctgagatggagttcagcgagggcttcctgaaggctcaggccagcctgcggggccagtactggaccctccaatcatgggtaccggagatgcaggaccctcagtcctggaagggaaaggaaggaacctgagggtcattgaacatttgttccgtgtctggccagccctggagggttgacccctggtctcagtgctttccaattcgaactttttccaatcttaggtatctactttagagtcttctccaatgtccaaaaggctagggggttggaggtggggactctggaaaagcagcccccatttcctcgggtaccaataaataaaacatgcaggctgaccggcgtttttttcttataagctgtccagacctggcttgaaaacccatcccatggcaaggcagggattcgctggccgcggttggctctatcttgatctgagcaagccgctggacgtccctagttatcttcttcctatccaggaagaaaatccaatcaggattccactccgaggatggcgcattagccagctccctgcgaagccccacccgtgtgtcctggtgtgaggctctgaccgctaaggtgtctgcgcgcctccaggccccgccccctatgctaataagcgcccgcctcctttgggagcaagtcgccgcaaactgcgagcccccgccccctacgctaatgacgcccgcccccctcgggcacacctctccgatgcctgcgagccccgccccgtatgctaacgagctccccacccccagctcctcgccgcagcctgcgggtcccgccccctacaataatgagcacctacctcccctcaaacgcccctagtcgcggcatgagggtcccgctcactatgttaatgagcacccgcctcccttcgggcgcgcctcgccgcagcctgaaagccccgccccctatgctaatatgctccctctcccacaaggcagcgcgccggctcggacgcggccggctaccgagccctttgtgagggctgtgagctgcgcctgacggtggcaccatgagcagctcaggtggggcgcccggggcgtccgccagctctgcgccgcccgcgcaggaagagggcatgacgtggtggtaccgctggctgtgtcgcctgtctggggtgctgggggcagtctgtgagtatccagtcggggagaggggccggccccgccgcgcatgcgctcctcgccctgccctgccccgccccgccccggcggccccaggggaaaggacccgctgggggtcgggggtctgccgggcgcctcccggggcggaggaatggcggggccgccgggagccggcgtcctggggttgccatggttacccgctcgggcctgggcgccttggtaccccgggctgggctgggctggcgcttctgggaacattcccggagggaccagaaaccccagggcgggggggcggcgggggcgggggtggggcaccggcctggggcacgtgactgagccctccccccgctccccaggggcttttgtgagactttctcggtgatgctcacggggcgcatgcccacctggcccgtactaaagcgtcaactgttgacttgggcgtaggtgacggcagccacattgctaacctttgggcaaggattgtttgtaagggaggcgggtgcacggctggctagatttctggcaggaagccactgggcggaagtttgctgagggtcaggtggtgtcagggcacaggtggcccctggggccgcggggcagtgagctgagggcccggcctctccctgggtcctctgtccgctctcatatctcccccgttgctgctgccttagccgcctgtcaccggccttcctccccttctccgcacgcatcccagtcacagaccctgaccttaggctgccagggaagctaggctcttaagcacagccagaaaaggacaaagagggaggcaggtcagctccaggagtgaatggaagccgtacagctggccttccagggaaagacaagtctgtctgagtgataccctttcctttcctgtctgccctcaatcttgtggattactggagtgggcaaggtcttagagaatgtctgtcgaggatgtctgcaggttttaaacagtgcctgcctggcagagagggctagctctgggcctgggcagggcaggccccatcagcaatcctgccagaaggaccaccttttcagggtcaccttgggttccacagcctttccaggtgggtagagggtggagggaggttgaggcaggagggtgctgggctaggagtgtgctgccctcgctaggcatgcccttatccagaggcaacggatacggtagggcaggccctacccccaaatcacaaaaaggccccgagtttgtgtcactgctcttcagggcaagtacgcttttgactttgtaggagagactggtgggtttgaagttaggcattggatccagtcctgtcatgtctggttagctgttttccctgcagattagggtgggcagtgcagtggggtgacatggtcagtggtgagaaaggaaaggtcctgactatggcctgtaggccacacctccttccttcttggtcagtggccctgccgactcccagatttgctgtggagtcttactcagttctgtgcctctcaaagtgaggtacctctgcctttcctgggagttcctggggctctgttgggtctacagatgaagcttcaggagaaacttgtggcattgccctgagttgtcagttgcatctgcagatttttgggggcatggttatgtgaacatcaaaatgctgtattacagggtagaatgcaaaaatgcagggtgttttagagatgcggcaggagttcagacaagggttgtgtgccgggctggtccttgggtaaggttttcctcctccagggtgaggggatcagagagagtacctggagagggtctaccctgggtcctaagagcatctggaggtgataccttgggaggggacaggattgcatggtgacagccccctcacgtggaagatatcagcattgaggcccccaagtggacatcctccagccctttattgctaaaggattcctggctggagcctgctggtctggcttgacacctggtcctcccccaaggctggctgtgggttggacagctggggtagggttggagctggaggccaaatgctgactgcagcaggaagcacagccgagctgtcaggtgaggccaggcacagcagagaggcagggagccgtgtcaccctttgggcactctgctaggacaggcaggcccctgtgtacctgtggttctggaacaccttgctgtctgaaggcagatgtctaaggctgtgctgaggagcagtgcaacgcttgagtcctttgttttagaaggagaccctgggggcccatgaagcagtcccattgcagttcggctcactttatctggcttctttgcctgctgtctgcataaggttacctgggaaaatggaaaacagcagaattccagacccaggtggagggatcaggtgcagaggagctgctgcaagtttaatgagctgggtgctaattgctgcctccaaggcccccctcagtgatggcctgggcttgctccctgcccagcagccacctccttggacctgccttgaaggctcctggagttcctggtgaagccaggctgcaggctgtgggtggaggagggagttgggtgcaagagaccctgctggtgaggtgcagctgggaggcggggcgtcaaggctgcacatctgagcatcagagaagccacgttctggggtggaaaacgatgccccctccccttcctggccttatggcatttcagcggtgggtggctgggctgtgggacttgctcatgtgcaagaggagaaacgggtctaggaagatgaagatagcgtgccagtggcacagggctggtgaggaagttagagctggaactgctgctcagtcttacctggttcccatctctgttctgagagaggcaccccttgtcccaaccaaaatccaagccacattttctgagtcagaggacttcttgtgtggccggccctgtgaatggtggcaagtgacccttaccgaaggctgagtcttgggggagcactggcctgaatccttgagggacattcactctttaatccttctttaatcctaacctccctttgaggtggatattgatgtagctggggtcagagggccagctcctctgagccctgaaacggggagaggatgctgtgagatccacctgccaccttgctgccaccttgctgtggggcctggggcaagcaaggcactgcacctctctgcgtctcctcacctgtctcagacgatagagggcaggcttctgggtgctgtgagaactgtgtgctgagcatccgcagagactctcgtcctttccagtcatctcccaaggccgccttcccagcgggctccgcctgcctccctgctgactcctgcccgtgtctcttgtttcaagcttgcgcgatctctggcctcttcaactgcatcaccatccaccctctgaacattgcggccggcgtgtggatgatgtgagtaatgcatggccgtcccaccccgggggtcttgctggtcgggaatctgctgggcacctcccgggacagaggagtggcaggggccgtgggagtgggcatccttgtggttgccatggctactggctccagcctgggtgcctcgggcatgtgagtttctggccacagcatgcggcttcttccccttcatacccccaccatgtttagtttcctaatgagaggtcaaggcccagggaatgcccaccccggccttcatccggtgcaggggcaaggccatcagtgctccagacatttctggagcatccactgagactgcagatgccaagtccactatactggggccctcgccctctgggagctcccaggactggggtggggaaggctgttcattggggctggctgaggactgggttgaatggtctgctgggagagggcactcgagctcggagctgtgccaaagatagatgggagaggcgggtcggagttgtcacgggaacccgtggtcagaacaccctcatgtgcgttccatgcccacctcctgccagggtttcgccatcccatcggaagggaaggcggggtgagggcaggcccgtgtggcttggggcacgtgagaagtggcggtgcaccaggaattgatgagtgtcctcatggggcttggtgccttgaggggtacagagctagacgagattcaggtcccgtccccagtgacctatggccagtggagagcctcgggggcctgctgtggtggggtcctcagtgcttgtgctggccagtggtggatagggaagggggatggacagagaggcgcccagcccagcttcagggggtggagtcggagcctggccgagtttgaagtggaagggctggcccagcacagagtgagcccgtgcttggaggcctggtgtgtgggaggctcggggcgggtgcagtggttaagagttgtgaagagagtgcctgccccgggcttggggtggctcttaggtgtcctgagcctgcatttctgttacacaggcataatgatggcacttttctcccaggcctggggacagaagggcctggctcagtgtctgctaactgattgttatccatgcatagagaataccaagaccacagcagacaccttccgtcaccagtggcttagctgttcccaccccaaacatagggctggatgcaaggacttgctaaagttcttcctccccagcgtgggcttcccctgggtgtccccgggcctggggccggtggcatcaggtgtgtgggcagctctccgtgactgttttgggactgcgtggctccagctctctgcctccctggtggggcagccttcctggtgctggtgccactgacggcttttggtggccatggcgataatactaacagcagacagaggacacagctgccagtgctccatctgtggatgaacctgccgcagcgttgtagcagtgccatgatgtggggtcccctttcctccatgtcacacaggaggaggataaagggaagcagaagcccaggggcttccctctaggagtgttcagttcagctggggagatgggtgtgcaggagcagctggggagtgctggagtcttcagcagaggctctccgaggggtacgagcaggtgccctggagcagccgggcggcttcccagaggaggagggatgagggcaggagggtgagggaggtggcattccttatggcactggcactgggggccgccctcatcctcctgggattgtcagtcgctgctcttctcctgccctggtccctgcagcatgaatgccttcatcttgttgctgtgtgaggcgcccttctgctgccagttcatcgagtttgcaaacacagtggcggagaaggtggaccggctgcgctcctggcagaaggctgtcttctactgcgggtgaggggttgctgggcagggtcccgtgacacagttccccaaaaccccactgacaaaataggacccaaaagtcaggtgagggtgggcagtgtattcagttcctctctgtggaagtgtaaactgggattgcctttgtgcacagtgatttgctcatagctgccaaaacgtgccccagtggttctgcgcccaggaactcagctgtcgctgtgccgtagtcactggaaggttcagaggtatatgagcatgtgtggcagcatccgtgcagtggagagaaagtgggaagcgtctggaattttggtccgtccactgggagttgttaaccagatgatagtaggtctgtaggacatgtttctctgcagcctttccgaagagtgggttcatctagatgtcctgacgtgaagggggagaagcaggttgcagagcagaaaatgtggttgccctctaaatacacttgttaaaaattttcccatttctaacaatgaaatcaatatgtaatacttctcctctcagtcataagaaggaactaatttcaggataagcttaatacacggaaactcctagaataatgcctctagtgcataggaggctggtggcagctgtattcattattgtctaggttatctttagaaagaagtctagatgcaagcttgcttccccttcagagaggcccggtagttttgatggtaagagcacaagccacatgcttagttctggagccatcttgtgccatatctaaatcacgaagaacacaggatcacaaagctcttatctacacgcagtgtcatgtccttaggggttcaaaaaactgtattttaaaaatgctagacatcatagaaattcattcacaataatttggaatatagaacaatgttactcgaagcccgctgcctgctaatcttctgatgtgtgtgcttcctgtctgcaggcattttttaaaagcctgcttttaacacagttataaccattatgaataagtttgtatcctgccttttttcacttagagtaatgatataagcatttgaacatcaccacagactttataacattctttcaatacaggaatattcattcagctggatgtatcatgctgttcttaatttcttaactggtgtaaatcgaggtgtgataaacatgtgtctgctaaaactttttctgtgtttatgatgatttccttaatatctattttcaggtgtggaattactgggtcaaagattctgatcattaaaaatattttaagatgcgtggctacgttgctttccaaagaggtcccttgagtctctcccccgcccccaccccagcccagggctgcacaccacttcacattcgcatttatctatttgttatctaagagggaaaaatattttcccacgtgtttccattgcattttctgatatgaaaattttcgagtttactttttaacctgtgggaacctcagtgttctgcttagcaagttcagtgtgttttctgtattaaagatttcatgatccttggttgtatttcctgcaactatttttccaggctcttgtttgcctttaattttgtttttgtcagaaggttccccgccgtggtctttttctttgtaatttctattattattttatcattttgaaattttttaacgacagaaaaatctcacaaccacatgtctacaagaatggaaactgaggtagaatgcaattggccacgagtcttgtcctcctgcacaggcagcctcctctagggaggcgacaggacagagcgctggcctccaggctgcaggtatcctcctggcccagttagcccaggaattgctgctggcctggaaattccagccaggatggagaatcagccccggggacgcttaagccccagtggaccctgccaccaggtgacgccaaactgcagcaaggtctgggccgaccccgcagaccccgcagcctgcagccctcccatgatgagaccctgtgttccatgtggttgaattccagggaccttacttgtggcgatgtggctggtgttactctataactcagagcatttatttagtgcctgtggtggtcagcattgtgtaggtaacatgactgacctcggacaagctttgatcccctctccgcggtggagattccgagtaacttgcccgcgaagctagtaggtcctggatgggaagccagattctctgtcacaggctctttctggccagtttttctcacagtgagggcactggaccatctcgttactgtttagctctttttgggatcacagaccccttcaaaaatctgatgaaagctttggatcctattcccagaatggaacagttttacagacaagttcagggctgatgaaggactttctgaagctgtgtctcagttgatttttggggatccttcctgtgccctgggtgtctaggaaggatgctgggccgagtctgggaagcggggaaggatgtggtggctgtggggccggagtgcccccttgacctctgctttccccccaggatggcggtcgttcccatcgtcatcagcctgaccctgaccacgctgctgggcaacgccatcgcctttgctacgggggtgctgtacggactctctgctctgggcaaaaagtgcgtctgccaggcccagcccctgggcagggccttcctccctccgccccccgaagtccttcagtgaggaggatctgagagtggccccttttagctagtggagaccgaggcagaggtcccagtaactcattggtgcctccagggctcagctcgagtgggtgaagacagaggacttacaacacttctgcgtggcccagtcttgccccgtcacggcctgcagcaaggatagcaaaaacatggctggtgggagccccttcccctcccaggtctgcaccgggcattgtactcagttgccaccctctctcctgcagagcccagactgaggctggttccttcgcagcccagcatcccagggagcctgggccattctcagaggggacaagacaggcctttgccaccccagcagttgtctctggggaaatcagaatgcctgcaggtcacacctgggtcacagggcaggaaccgggcagtggtcaggagggctgtgggcatggggctggtgctccacgtgacgctgcctctctctctccccaggggcgatgcgatctcctatgccaggatccagcagcagaggcagcaggcggatgaggagaagctcgcggagaccctggagggggagctgtgaagggctgggcgcccctccctccctgtcccctcttctggctctgtgtgggtccaagtgaggcctggactgtccacgctgaggcacagcctggagaggggcctttgcacgtgtccctacacctggagtcctctgctcctttctccagactggcttaagccaggagccactggctgctggtgtgagggtctgggctgctggacttgaggcagagcctgcagcagctgtgtggacactacccagccctactcctctgctgggtgggtctgcagatctcacaccacagacagggctgcctgtgacctgctgtgacctgggagcagcttcccctggagatgctggtcctggcttgaggggaggggcaagtgggaccctgccacctgggcactgagcagagggacctcccccagctctcttagcaggtggagccccagggcctgggacagcctgccgctgccagcaacctcccactgctgcctagggtgcagcgcccactgtcaccctgccttctgaagaagcccacagggctcctaaggtgcaccccggtacctggaactgcagccttggcagtgactggacagctgggtgggggatgctccctgctggccctgggaaccttggacaggccacctcaaggcccctcggctgcccctcctccctgggcctgctggggcccctaggttctgcccatcaccccccgcccctgctggccttggtgctaaggaagtggggagag

SEQ ID NO: 370 - DNA, 129408 bp, Homo sapiens
ataagaacgtcacggagagtggggtatccatcctctcaagcatttatcctttgagttacaaacgatcagattacattctctaagttattttaaatgtacaattaagttactattgactgtagtcaccctgttgtgctgtcaaatggtcttattcattctttctatgtttttgtacccattaactaccccacttaacctgcagccctctactacccttcccagcctctgttaaccatccttctactctctatgcccatgagttcaattgttttgatttttagatcccacaaatacgtgggagaatgcaatgtttgtctttctgtgccaggctcatttcacttaatataatgatctccagttccgtccatattgttgcagatgacaggatctcacttttttaatggctgaatagtactccatggtgtatatgtactacgtttttttatccattcatttgttaatggacacttagttgcttccaaatcttagctgtcataaacagtgctacgacaaacataagagtgcaggtatctcttcgatatcctgacttacttccttttgggattgctggaacatatggtagctcaatttctagttttttgagggacctccaaactgttctccatagtggttgaactaatagtttacattcttaccaacagtgtgcaaggattcccttttctccacatcctcaccagcatttattattgcttgtttttgcatataagccattttaactggagtgagatgatacctcattgtagttttgatttgcattcctctgatgatcagtgatgtgtggaataccttttcatattcctgtctacaattcgtatgtcttttgagaattgtctattcaaatcttttgcccattttttgattgggttattagatttttccctataaatctaatagtaaatagttgtttgagctccttatatattctggttattaattccttgtcagaggggtagtttgcaaatattttctcccattctgtggattgtctcttcactttgttggttatatcctttgctgtgtggaagctttttaatttgtgatcccatttgtccatgtttgctttggttgcctgtgcttgtgggatattactcaagaagtctttgccagaccagtgtcctagagattttccctcaatgttttcatttagtagttccatagtttcagaacttatatttaagcctttcatctattttgatttgatttttgtatgtggtgagagataggggtctagtttcattcttttgcatatgggtatccagttttcccattaccatttattgaagagactgccttttccccagtgtatgtatgttcttggcaactttgtcaaaaatgagttcactataggtgtgtggatttgtttctgagttctctattctgttccattggtctgtgtctgtttttatgcctgaccatgctgttttggttactgtagctctgtactgtaatttgaagtcaggtaacatgattccaccagttttgttctttttacttaggatagctttggctattctgggtcttttgtagtttcatgtacattttaggatttttttttctatttctgtgaataatgtcactggtattttgatagggattgcattgactctgtagattgctttgggtggtgtggacattttaacaatattgattcttccaatccatgaatttggaatatttttccttttttttttttggtgtccttttccattttgttcattggtgttttatactttaatataggaatttttaaaagtataatttaggaaggattataaaatatctctgtaagaggtttttctttagggtttggttgtgtgtgtgtgtgtgtgtgtaaatatcggggtagagaggctttgggtgtttgcatatgtctgtgagagaaaaacagctttttggtggtggggtgagaaaaaggagaattttattcaaagaaataaaagtagcatacagtctttcagaaatatgtaatgtgaagcaaatgcataatggaagaacttagaacaggaaaggattagtcttcagctttacagagaaaaagaaaaatctgaaaaacatttttcaacctttgtagtttcagtgttacgtagctagtttatatttagatgattttctgattttgagacattaacatttttgtttatcatttgtaggtttttagaacgactgttcgagcgacatataaaacaaaataaacatttggaggaggtttgtctttccttataacttcattagaaaaattataatgtaaaaataattgtatggtttttttcataccttcaaacaatacattaaaagcaagtgctttttttttcccttgaacttttttgagggtggtggtgggagaagtgaaaggaaaagtattaatcctgtgagattttcagcactgcagtcaaaatttaatttgactcaattaatgtaattagtctcatcttttcttaatcctaggaaaaaatgcgccacctgctgcatgtcctgaaagtagacttaggctgcacatcggaggaaaactcggtaaagcaaaatgatgttgatatgttgaatgtatttgattttgaaaaggctgggaattcagaaccaaatgaattaaaaaatgaaagtgaagtaacaattcagcaggaacgtcaacaataccaaaaggctttggatatgttattgtcggcaccaaaggatgagaacgagatattcccttcaccaactgaatttttcatgcctatttataaatcaaagcattcagaaggggttataattcaacaggtgaatgatgaaacaaatcttgaaacttcaactttggatgaaaatcatccaagtatttcagacagtttaacagatcgggaaacttctgtgaatgtcattgaaggtgatagtgaccctgaaaaggttgagatttcaaatggattatgtggtcttaacacatcaccctcccaatctgttcagttctccagtgtcaaaggcgacaataatcatgacatggagttatcaactcttaaaatcatggaaatgagcattgaggactgccctttggatgtttaatcttcattaataaatacctcaaatggccagtaactcaatattacttttcttccttttttaaaatgtatgtataagatttctctattggttttctgtgctgcaataataagttaccagaaacctagcggcctaatgtgccacacatttattatttatcccacagttttgtggatcaggagtgtaggcacagcttagttgggtcctctgtcctgggtctcacaaggctaccccacaatcaaggcagtggctggggccatgttttcattaagaggcttgttggcagaattatcctccttgcagttatagatttgagggcttcgttgtcttgctgaccagtggctagaggctgcctatagttctctgccacttggccctttccttagggaaattataacgtggctgcttgcttttttaaggatatcaggaaaaccagagagattctgctaacaagatggagtcttatataatgtaacataatcacaggagtgactttctatcacctttaccgtgttcttttgggtagaagcaagtcacaggtcttgcccacacttaagggttgggaatatatacaagggtgtgaatgccagaacacaggaatcactggggtcatctgaggacctgctggccacaatttctaaaatcacttttcagaggaaaacatattttacctatattttcagaggaacatattttacccagacataagcggttttgtaggctatgggaaatggtttatgatctggtgtgagtcttgaagcgttggaccttgtctgcaatatctttaattttgtttttctcacttttcctgcaatatctaaagcctcaaggacctttcagttgtcagtgacccagggaattctgtcagctggctgagatgttgtctcttgttgtgagtgcaaacatttagtcagacctgtctgaagccctctcctacccttgtagctcatgaatgagacccttactattagaacatggcccagcagattcatctctaattatacctttttaactatttacaataatataattgaatatttgtgtgcccattatgtacaaagtttcatgcctagatactgtggaggataaaaacaataacccattttgtttttataagctatattttaattttatatttaaaaaaatacaacccaggtattcttctaaaaacttaacagtgacttccaagtatcctgttctttaactcgggtttttatcatcctttggccatagcagtgtttcccaaagggtggtacttaccactggagacctgagagttgattttagtggtatgtggatgacaggtccatctcattcatgggatgctgaccatcaccactgtcttcaggataagacacaggtacaacctgcaaagcacaatatggtgggactgagcacccaacccacttttcacctccactgtcggaatccccaactcaccctgctacaacccttttttggcacaccttcccctcagccctcacctctggacttcttccctttaaccctgtaagcaacaccgtctatcccctcttgcagtcctcttaaacctcctgaaataaccttggctctattcttggtccccagcctgggtctccccatctgttagatctttacccctctagttgcttcttgggttctgttgttcctcagccccagggttcctttcttcagtcccagcctcactctttcacaaaccccctcttcccattccccatgtaactaccccagacctactggcctggcccaaattttccttccttggctggagctaccatctgtctttccggaggcattctcagaaactatctcctggctgctgttctccaacactttggtccaagccccagacctgccctatttgacattcagtcttcatgctctaactctgggtacagcttcttgtctctggggccatgacccatcctaatttggatacctattaggacaatttgttgttatcctttagtttccctttaagttttaaaaggtgagttgatttaaagaaatattaaaaatggttcttgaatgtggcaaaagtattatagtatgaaggtaggatgtgggtggtaagtttgggaaacagcacttaaactcttctagcagcatctttttttatccctaagacatcttgttacagcatcaagcaacatctttatatcttcccctcttccttctcacacagcccatcaactgaggctgagaggcatgatgaatgcgagtgtgtcttctgagccaggttgcctggatttgattccttttgagctgtgactttgagctgggttactgagcctgtgtgtgttttctcatatcttggagaggggtaattatagagcctttatcatagaatacaagaattaaatgagcttgcatgataaatacaggctgctgctacttttttttttgctatttattttttatttcagtaggattttgggaacaggtgatgtttggttacatgaataagttcttcattggtgacttctgagattttggtgcacccagcacctaagcagtgtacattgtacccaatgtgtagtcttttatccctcactccccgcctaccctttcccctcagcccccaaagtccattgtattattcttatgcctttgcatcctcatagcttagctcccacttatgagtgagaacatacaatgtttggttttccattcctgagttacttcacttagaataatggtctccaattccatctaggttgctgcaaatgccattatttcattcctttttatggctgagtagtattcaattgtgtgtgtgtgtgtgtatatatatacacacatcacattttcattatccacttgttgatcgatgggcatatgggctggttccatatttttgcaattgtgaattgtactcctataaacatgcgtgtgcaagttatcttttttgtataatgacttcttttcctctgggtagatacccaggagtgggattgctggatcaaatggtagatctacctttagttctttaaggaatctccacactgttttccatagtggttgcactagtatacattcccactaacagtgtaaaagtgttccctgttcaccacatccacaccaatatctactatttttttattttttgattatggccattcttggaacagtaaggtggtatcgcgttgtggttttgatttgcagttccttgataattagtgatgttgaacattttttcatatgtttattggctatttgtatatcttcttttgagaattgtctattcatgtccttagcccattgttgatgggattgtttttgtttcttgctgatttgtttgagttacttgtagattctggatattagtcctttgtcagatgtatagattgcaaagattttcttcactctgtgggttgtctgtttactgattatttcttttgctatgcagaatcattttagtttacctaagtatcatctgtttatctctgtttttgatgcatttgcgtttgggttcttggtcatgaacactttgcctaagccagtgtctagaaaggcttttctgatgttatattctagaatttttatagtttcaggtcttagatttaagtctttgatccatcttgagttgatttttccataaggtgagagatgaggatcgagtttcattcttctacacgtggcttaccaattgtcccagcaccatttgttgaatagctttgttgacagtcagctgactgcaaatatgtggctacatttctgggttgtttattccattcctttggtctatatgcctgtttgtttgtttgtttgtttgtttgtttgtttttgaggcagagtctcactctgtcacccaggctggagtgcagtggtgtgatctgggctcactgcaacttctgcctcctgggttcaagcgattctccgacctcagcctcccaagtagctgagattacaggcacctgccaccatgcccagctaatttttgtagttttagtttgtagtttgtaattttagtagagacggggtttcaccatgtgggccatgttggccaggctgtctcaaactccagcatagaaggtatgttccttctatgctgattttgctgagggttttaatcataaagggatgctggattttgtcaaatgctttatctggtctattcagatgatcatgtgatttttgtttttaattctgtttatgtggtatatcacatttattgattttcagatgttaaaccatccctgcagccctggtatgaaacccacttgatcgtgatggattatctttttgatatgctgttggattcggttagctaggatttcgttgaggatttttgcatctgtgttcatcagggatgttggtccatagttttgtttttttgatatgtcctttcctggttttggtattagggtgatcatggcttcatagaatgatttagggaggattccctctttatcttttggaatagtgtccataggattggtaccaattcttctttgaatgtctgatagaattcagctgtgaattcatctggtcctggaatttttggttttttgttagtaatttttttttttttttttttgagatagagtctcgctctgtcacctaggctggagtgcagtggtgcgatctcagctcactgctgcaacctctgcctcttggtttcaagcaactctcctgcctcagcctcccaagtagctggaattacaggtgcctgccactgcgcccagctaatttttgtatttttagtagagacatggtttcaccatgttggccagactggtcttgaactcctgacctcgtggtccacccgccttggcctcccaaagtgttgggattacaggcgtgagccactgtgcccagcctatttttgttggtaatttttaaattaccatttcaatctcactgctcgttattggtctgtttagagttttctgtttcttcctgtttaatctaggagggttgtatatttccaggaatgtatccatctcctctaggttttctagtttatgcatgtaaagctgttcatagtagccttgaatcatcttttttgtttctgtggtatcggttgtaatatgtcctgcttatttcttgtatttatttatttatttattattattatactttaagttttagggtacatgtgcacaatgtgcaggttagttacatatgtatacatgtgccatgctggtgcgctgcacccactaactggtcatctagcattaggtatatctcccaatgccatccctcccccgaccccacgaccccacaacagttcccagagtgtgatgttccctttcctgtgtccatgtgttctcattgttcaattcccacctatgagtgagaacatgtggtgtttggttttctgtccttgagatagtttgctcagaatgatggtttccagcttcatccatgttcccacaaaggacataaactcatccttttttatggctgcatagtattgcatggtgtgtatgtgccacattttcttaatccagtctatcattgatggacatttgggttggttccaagtctttgctattgtgaataatgccgcaataaacatacgtgtgcatgtgtctttatagcagcatgatttatagtcctttgggtatatacccagtaatgggatggctgggtcaaatggtatttctagttctagatccctgaggaatcgccacactgactttcacaatggttgaactagtttacagtcccaccaacagtgtaaaagtgttcctatttctccacatcctctccagcacctgttgtttcctgactttttaatgatcgccattctaactggtgtgagatggtatctcattgtggttttgatttgcatatctctgatggccagtgatggtgagcagtttttcatgtgttttttggctgcataaatgtcttcttttgagaagtgtctgttcatgtcctttgcccactttttaatggggttgtttgtttttttcttgtaaatttgtttgagttcgttgtagattctggatattagccctttgtcagatgagtaggttgtgaaaattttctcccattttttaggttgcctgttcactctgatggtagtttcttttgctgtgcagaagctctttagtttaattagatcccatttgtcaattttggcttttgttgccattgcttttggtgttttagacatgaagtccttgcccatgcctatgtcctgaatggtaatgcctaggttttcttctagggtttttatggttttaggtctaacgtttaagtctttaatccatcctgaactgattttcgtataaggtgtaaggaagggatccagtttcagctttctacatatggctagccagttttcccagcaccatttattaaatagggaatcctttccccattgcttgttttcctcaggtttgtcaaagatcagatagttgtagatatgcggcgttatttctgaggcctctgttctgttccattgatctatatctctgttttggtaccagtaccatgctgtttttgttactgtagccttgtagtatagtatgaagtcaggtagtgtgatgcctccagctttgttcttttggcttaggattgacttggcgatgcaggctcttttttggttccatatgaactttaaagtagttttttccagttctgtgaagaaagtcattggtagcttgatggggatggcattgaatctgtaaattaccttgggcagtatggccattttcacaatattgattcttcctacccatgagcatggaatgttcttccacttgtttgtatcctcttttatttccttgagcagtggtttgtagttctccttgaagaggtccttcacatcccttgtaagttggattcctaggtattttattctctttgaagcaattgtgaatgggagttcactcatgatttggctctctgtttgtctgttgttggtgtataagaatgcttgtgatttttgtacattgattttgtatccagagactttgctgaagttgcttatcagcttaaggagattttgggctgagacaatggggttttctagatatacaatcatgtcatctgcaaacagggacagtttgacttcctcttttcctaactgaataccctttatttccttctcctgcccaattgccctggccagaacttccaacactgtgttgaataggagtggtgagagagggcatccctgtcttgtgccagttttcaaagggaatgcttccagtttttgcccattcagtatgatattggctgtgggtttgtcatagatagctcttattattttgaaatacgtcccatcaatacctaatttattgagagtttttagtatgaaaggttgttgaattttgtcaaaggccttttctgcatctattgagataatcatgtgttttttgtctttggttctgtttatatgctggattacctttattgatttgcgtatattgaaccagccttgcatcccagggatgaagcccacttgatcatggtggataagctttttgatgtgctgctggattcggtttgccagtattttattgaggatttttgtatcaatgttcatcaaggatattggtctaaaattctcttttttggttgtatctctgtccggctttggtatcaggatgatgctggcctcataaaatgagttagggaggattccctctttttctatggattggaatagtttcagaaggaatggtaccagttcctccttgtacctctggtagaattcggctgtgaatccatctggtcctggactctttggttggtaagctattgattattgccacaatttcagatcctgttattggtctattcagagattcaacttttcctggtttagtcttgggagggtgtatgtgtccaggaatttatccatttcttctagattttctagtttatttgcatagaggtgtttgtagtattctctgatggtagtttgtatttctgtgggatcggtggtgatatcccctttatcattttttattgcatctatttgattcttctctctttttttgtttattagtcttgctagcagtctatcaattttgttgatcctttcaaaaaaccagctcctggattaattaattttttgaagggttttttgtgtctctatttccttcagttctgctctgattttagttatttcttgccttctgctagcttttgaatgtgtttgctcttgcttttctagttcttttaattgtgatgttagggtgtcagttttggatctttcctgctttctcttgtgggcatttagtgctataaatttccctctacacactgctttggatgcgtcccagagattctggtatgtggtgtctttgttctcgttggtttcaaagaacatctttatttctgccttcgttttgttatgtacccagtagtcattcaggagcaggttgttcagtttccatgtagttgagcggttttgagtgagattcttaatcctgagttctagtttgattgcactgtggtctgagagatagtttgttataatttctgttcttttacatttgttgaggagagctttacttccaagtatgtggtcaattttggaataggtgtggtgtggtgctgaaaaaaatgtacattctgttgatttggggtgaagagttctgtagatgtctattatgtctgcttggtgcagagctgagttcaattcctgggtatccttgttgactttctgtctcgttgatgtgtctaatgttgacagtggggtgttaaagtctcccattattaatgtgtgggagtctaagtctctttgtaggtcactcaggacttgctttatgaatctgggtgctcctgtattgggtgcatatatatttaggatagttagctcttcttgttgaattgatccctttaccattatgtaatggccttctttgtctcttttgatgtttgttggtttaaagtctgttttatcagagactaggattgcaacccctgcctttttttgttttccatttgcttggtagatcttcctccatccttttattttgagcctatgtgtgtctctgcacgtgagatgggtttcctgaatacagcacactgatgggtcttgactctttatccaatttgccagtctgtatattttaattggagcatttagtccatttacatttaaagttaatattgtaatgtgtgaatttgatcctgtcattatgatgttagctggttattttgctcattagttgatgtagtttcttcgtagtctcgatggtctttacattttggcatgattttgcagcggctggtaccggttgttcctttccatgtttagcgcttccttcaggagctcttttagggcaggcctggtggtgacaaaatctctcagcatttgcttgtctgtaaaggattttatttctccttcacttctgaagcttagtttggctggatatgaaattctgggttgaaaattcttttctttaagaatgtcgaatattggcccccactctcttctggcttgtagagtttctgccgagagatccgctgttagtctgatgggtttccctttgagggtaacccgacctttctctctggctgcccttaacattttttccttcatttcaactttggtgaatctgacaattatgtgtcttggagttgctcttctcgaggagtatctttgtggcgttctctgtatttcctgaatctgaacgttggcctgctttgctagattggggaagttctcctggataatatcttgcagagtgttttccaacttggttccattctccccgtcactttcaggtacaccaatcagacgtagatttggtcttttcacatagtcccatatttcttggaggctttgctcgtttctttttattcttttttctctaaacttcccttcccgcttcatttcattcatttcatcttccatcgctgataccctttcttccagttgatcgcattggctcctgaggcttctgcattcttcacatagttctcgagccttggttttcagctccatcagctcctttaagtacttctctgtattggttattctagttatacattcttctaaacttttttcaaagttttcaacttctttgcctttggtttgaatgtcctcccgtagctcggagtaatttgatcgtctgaagccttcttctctcagctcgtcaaagtcattctccgtccagctttgttccgttgctggtgaggaactgcgttcctttggaggaggagaggcgctctgctttttagagtttccagtttttctgctctgttttttccccatctttgtggttttatctacttttggtctttgatgatggtgatgtacagatgtgtttttggtgtggatgtcttttctgtttgttagttttccttctaacagtcaggaccctcagctgcaggtctgttggagtacccagccgtgtgaggtgtcagtctgcccctgcttgggggtgcctcccagttaggctgctcgggggtcaggggtcagggacctacttgaggaggcagtctgcccgttctcagatctccagctgcgtgctgggagaaccactgctctcttcaaagctgtcagactgggacatttttttgtcctgcttatttctaattgagtttctttggatcttctctccttttcttcgttaatctcactaatggtctatcaatttcatttctcttttcaaagaaccagctctttgtttatcttttatattgtgttttttttgtttgtttcaatttcatttaattctgccctgatcttagttatttctttacttctgctgggtttgggtttggttgattcttgtttctctaactccttgaggtgtgaccttagattgtctatttgtactctttcagacttcatgatgtaggcatttaatactatgaactttcctcttagctctgtctttgctgtattccagaggttcagatattttgatagtttgtgtcactactatcattcagttcaaagaattttttaatttccatcttgatttcattgttgacccagtgatcattcaggagcaggttattgtacttccatttatttggcatggttttgagggttccttttgcagttggtttctaattttattctactgtggtctgtgagagtacttgataagatttttattttttaaaatgtgttgagacttgttttgtggcctatcatatatggtctatcttggagaatgtttcatgtgctgattaatgaatatatactctgcagtttttggctagaatgttctgtgaatatctgtttagtttatttgttctagggtacagtttaagtccatagtttctttgttgactttctgtcttgatgacctgtctactgctgtcagtggagtattgaagtcccccactattactgtattaacatctatctcatttttttggtctagtagtaattgttttgtaaatttgggagctccagtgttaggtgcatagatacatttaggattgtgatattttcctgctggactagtccttttatcatcatataatacccctctttgtcatttttaactgctgttgctttgaagtttgtgtgatacaagaatagctactcctgcttgcttttgttgtccatttgcatggaaagatattccattggtaacaaatatcccactggtattttgttggtaactttttaattaccatttcaatcttgctgcttgttattggcctgttcagagtttctgtttcttcctgggttaatgtaggagggttgtatatttccaggaatttatccatctcctctaggttttctagttattccattcaagatattccatccaaatggacatcaaaagcaagcaggagtagctattccacccctttacctaagtttatgtgagtctttatgtgtcaggtgggtctcttgaagatagaatatacttggttgatgaattcttatccattctgccatttcatatcttttaggtggagcatttaggccatttacattaaacattagtattgagatgtgaggtactattctattcatcgtactatttgttgcctgaataccttaggtttttttttcattgtgttaaaatgaaaaattataggtcctgtgagatttatgctttaaggatattctattttgatgattttgaggatttaagatttagagctccttttagcagttcttttagtgctggcttggtagtggcaaattcagcatttgtttgtctgaagaagactgtatctttccttcatttatgaagcttaattttgttggatacaaaattcttggctgataattgctttgtttaaggaagctaaagataggaccccaatcccttttagcttgtagggtttcggctgagaaatctgctattaatctgataggttatcttttataggttacctgatgcttttgccgcatagctcttaagagtctttcctttttcttgactttagataacctgatgactatgtgcctaggcaatgatctttttgtgatgaatttcccaggtgttctttgaacttcttgtatgtggatgtctagatctctagcagagctgaggaagttttcttcaattattccctcaaatatgttttccaaacttttagatttatcttcttcctcaggaacaccaattattcttaggtttggtcatttaacataatcccaaacttcttggaggctttgatcattttaaaaaattctttcttctttgtctttgtcagattgggctaatttgaaagccttgtctttgagctgggaagtttctttcttccatttgttcaattctattgctgagaccttccaatgcattttgcattttgcatttctctaagtgtgttcttcatttctagaagttgtgctttttgttttgtttttgtttcgttttgagatggagattcactcttgtcgcccaggctggactggaatggcgcaatcttggctacctgcaacctctgcctcctgggttcaagcgaatctcctatctcagcctcccgagtagctgggattacaggcgtctgccaccacagctggttaatttttctatttttagtagagacagggttcaccacgttgggcaggctggttttgaactcctgacctcaggtgatccacctgcctgagcctcccaaactgctgggattgcaggcgtgagccactgctcccggccgtgattgttttttacttatgctatttcactggagatttttccattcatatcctatatcttttttttttttttctttgaaaaggagtcttgctctgtcacccaggctggagtgcagtgccacaatctcggctcactgcaacctctgcctccctaggttcaagcaattctgcttcagcctccccagtagctgggattataggcgcccaccaccatgcctagctaatttttgtatttttagtagagacagggttttgccacgttggccaggctggtctcgaactcctgacctcaagtgatccacctgcttcggcctcccaaagtgttggggttataggtgtgagccgctacacctggccctatatcattttttttatttctttaagttagactttacctttctctggtgcctccttgattgacttaatagttgaccttctgaattcttttttcctgcagtttagagattttgtcttggtttggatccactgttggtgagctagtgtgatcttttggggtgttaaagaaccttgttttgtcatattaccagaattgcttttctggttccttctcatttgggtagagaatgtgagggaagatctgggactcaagggctgctgttcagattcttttgtcccacaggatgctcctttgatgtggtgctctccccttttccctagggatggcatgtcttgagagccaaactgcagtgattgttatttctcttctggatctagtcacccagcagggctaccaagctctgggctggtactggggagtgtctgcaaagagtcctgagatgtgattcatcttcaggtctttcagccatggataccagcacctgctcaagtggaggtagcaggagagtgaagtggaccctgtgagggtccttggttgtatttttgttaagtgtactactggttttgtgttcgttggcctccagccaggaggtggcgctttcaagagtgcatcagctgtggtattatagggaaaatcacactgtgggcggggccatagagctcccaagagattatgtccttttttttggagttcttctgctgtcccgcagagcctacagcagcaatccatctccttctgtctgctcaattctcttggctttcctggtatattcctgcagtagttcttggagcaaaagttcacaatgtgggtttccacacgctgctctgtccatctgagtgggaactgcaaattagtcctgcctcctatctaccatcttccctccagtataccccctgctgctagtatttttaaacaaaccatgccactctcttctttaaaacacctgtgagagtttgcacttgctaacacaataaagtccaggacctttggcattttctatgttatattttccttcccagttcatgtcctgccatcctctccgaagcaccctgtgtcaatcacacctactcgcttgttcttcacacatagaggtcctctctctctccatgtatctgctcagggtatcatttcctctctttggcaccctggagtcttcatttaaatcccagactgaatataacacctcctgtgaaaccttgagggattgccctaacatttgtccctcctaccccaactctgtgatctgaaatctgtcttactacatgagttttataatactgtttacccaatttgtctctagactgtaagattctcaagaggaaggacctgtttctctttggatacccagcttgacaatgaatgcatttgttcacggaggaagatagtttgagcttaatgggaggtttagcttcagataaggttatagggaaaacaggatatttcctcttctctttatactcagaaagttcaggttccccgtgtagaaagaagaatgtagcagattgctaagctacatgaaaatgtgtttgctcacattttaaatggtgtaaaatataaattaacatcatcattagaaggctggccttaaaaagtcacatggtctctaggaagtcaataagtaaagaacagagcagcttttgtgggcaagactatactttgccaagtgaactaattagctgtatggtcaccagtgaattactttatcccagaccttgtgtgtttttgatttctcagacctcacggggatgaagggccttggttttaaagagctcggactaaatgatccaaagatttctttttgttactaaaattagttctactttaattcttaaggtctgtagaaattaaaatggaaataatttatatttgaagtagaaatacctattcactcttcatgtgctggtgtagtattggaaatcagtctgctaaaccgattcatacttcagtgatagaagatgccaccctgagttactttccccagtagccagatggaaccagtaaggaatatcatatcctaaaagaacaaatccatgtttaaagactgggaggaagatctttttgggttggagtaaggaaagttttgcaccaaggctaagcttgttgccttgtgcattctgctttgtgctcatattcgagttttgaggcaaaaacacacacctagcagtttgggacatgaggcctccatatcacctagtttttccaacccaacaaaccctcaagtttctcccgagagaaagaatataccattgtataagtttcctattgctgctgtaacaagttaccacaaacattaaaaaacatatcttacagttctggaactcaagtcctaaaatcaagctattgctggagccacattcctcttggaggctgtaggggagaatctgtttccttgcatttaccagcttgcagaggctgcctgcgttccgtcacttgtggcatcttcctccattttctagccaattgtggaggatctttaaatctctttactaaagaccctggtgattactttgtgtccacctggataatccaggataatcccccaactcaaaaatgcttcatttagtcacatctgcacagtcccttttgccatgtaaaatttataacttcaggggattaggatatggacatatctggggagctgctattcagcctaccatgactataaatatcattaacctaattaaaatggcctaaattagctggctgtggtggctcacctataatcccaggactttgggaggccaagatgggaggatcgcttgagctcaagagttcaagaccgaccagcctggtcaacagagtgagaccccatctacacacacacacacaaaaattagctgggtgtggtggcccacagctgtagtcctagctaattgggaggctaaggcaagagaatcacctgagttcaggagatggaagctgcagtgagttgtgatcaggccacttcactccaccctgggtgacagagcaagaccctatctcaaaaagaaaaaaaaagaaagcctagatagactttagtttgtattaattatagcttggctatacaatgagtcccaaattaggacatatattaaacgtccattgatttttaattactaaagcagtggttctcaaactttaatgtgtatcaaaatcacctggaaaactaaagtgatttctgggccccatccccatagcttctgactcaaaatatttagatctgggtcaaggctcaagaatttgcatttctaacagattccagatgctgctactactggtccgaaaacaaccccactggaagatgaataaagtggacacaacaaatagcatatgttctactatagaggtggccacatgaagagctctgcaagcccactgtgaaattgatagcaaatctttattcaagtgtattaattgacccacaaatatcctgattaatgaagctggctagtttggcaagatgcattctaactcttaaagtgattgattactgtggagatgtgtgatgacagattggcacctactaaggaaacctctcttgcctggtacattattaaaaataatccagtggggaaataggactaatttaattacatgcctttatgcagtaagatccacagttgaaaaatagaggcagtagctttaattgcactgtaatgttcacacacaaatcatatcttgcttgaaacagttttatggcaaaaatagaccatatattgatttcacatatataacatttaacccttcaagcctttttgcccattaaatatacacacctttacaaaccaataacagtttagaagaattaagctcttctgattataaacttttacattattgatcagacagtagcacataaaattgcttttttttttagtattttacatgaataattttatttgtgcttcatgaaaactccatttatcccattttttattatactttaagttttagggtacatgtgcacaatgtgcaggtttgttacatatgtatacacgtgccgtgttggtgtgctgcacccattaactcatcatttacattaggtatatctcctaatgctatccctccccctccccccaccccacaacaggccctggtgtgtgatgttccccttcctgtgtccatgtgttctcattgttcagttcccacctatgagtgagaacatgcagtgtttggttttttgtccttgcgatagtttgctgagaatgatggtttccagcttcatccatgtccctacaaaggacatgaactcatcattttttatggctgcatagtattccatggtgtatatgtgccacatttccttaatctagtctatcattgatggacatttgggttggttccaagtctttgctattatgaatagtgctgcaataaacatgtgtgcatgtgtctttatagcagcatgttttataatcctttgggtatatacccagtaatggggtggctgggtcaaatgatatttctagttctagatccctgaggaatcgccacactgacttccacaatggttgaactagtttacagtcccaccaacagtgtaaaagtgttcctatttctccacatcctctccagcacctgttgtttcctgactttttaatgactgccattctaactggtgtgagatggtatctcattgtggttttgatttgcatttctctgatggccagtgatgatgagcattttttcatgtgtcttttggctgcataaatgtcttcttttgagaagtgtctgttcatatccttcgcccacttgttgatggggttgtttgtttttttcttgtaaatttgttagagttctttgtagattctggatattagccctttgtcagatgagtagattgcaaaaattttctcccattctgtaggttgtctgttcactctgatggtagtttcttttgctgtgcagaagctctttagtttaattagatcccatttgtcaattttggcttttgttgccattgcttttggtgttttagacatgaagtccttgcccatacctatgtcctgaaaggtattgcctaggttttcttctagggtttttacggttttaggtctaacatttaagtctttagtccatcttgaattaatttttatataaggtgtaaggaagggatccagtttcagctttctacatatggctagcaaggtttcccagcaccatttattaaatagggaatgctttccccatttgttgtttttgtcaggtttgtcaaagatcagatggttgtagatgtgtggtattatttctgagggctctgttctgttccattggtctatatctctgttttggtaccagtaccatgctgttttggttactatagccttgtagtataatttgaagtcaggtaacatgatgcctccagctttgttcttttggcttaggattgtcttggcaatgcgggcccttttttggttccatatgaactttaaagtagttttttccagttctgtgaagaaagtcattggtagcttgatgagggtggcattgaatctataaattaccttgggcactatggccattttcatgatattgattcttcctatccatgggcatggaatgttcttgcatttgtttgtgtcttcttttatttcattgagcagtggtttgtagttctccttgaagaggttcttcacatcccttgtaagttggattcctaggtattttattctctttgaagcaactgtgaatgggagttcactcatgatgtggctctctgttcgtctgtgatttgtgtataagaatgcttgtgattttttgcacattgattttgtatccagagactttgctgaagttgcttatcagcttaaggagattttgggctgagacgatggggttttttaaatatacaatcatgtcatctgcacacagggacaatttgacttcctcttttcctaattgaataccctttatttctttctcctgcctaattgccctggccagaacttccaacactgtgttgaataggagtggtgagagagggcatctttgtcttgtgccagttttcaaagggaatgcttccaggttttgcccattcagtatgatattggctgtgggtttgtcataaatagctcttattattttgagatacatcccatcaatacctaatttattgagagtttttagcatgaagggctgttgaattttctcaaaggccttttctgcatctattgagataatcatgtggtttttgtctttggttctctttatatgctggattacatttattgatttgcatatgttgaaccagccttgcatcccagggatgaagcccacttgatcatggtggataagctttttgatgtgctgctggattcggtttgccagtattttattgaggatttttgcatcaatgttcatcagggatattggtctaaaattctctttttttgttgtgtctttgtcaggctttggtatcaggatgatgctggcctcataaaatgagttagggaggattccctctttttctatggattggaatagtttcagaaggaatggtaccagcttcttgtacctctagtagaattcggctgtgaatccatctggtcctggactttttttggttggtaggctattaattattgcctcaatttcagatcctgttattggtctattcagagattcaacttcttcctggtttagtcttgggagagtgtatgtgtcgaggaatttatccatttcttctagattttctagtttatttgcttagagatgtttatagtattctctgatggtagcttgtatttctgtgagatcagtggtgatatccccttcatcatttttttattgcctctatttgattctcccctcttttcttctttattagtcttgctagcagtctatcaattttgttgatcttttcaaaaaacgagcccctggattcattgattttttgaagggttttttgtgtatctccttcagttgtgctctgatcttagttatttcttgccttctgctagcttttgaatgtgtttgctcttgcttctctagttcttttaattgtgatgttagggtgtcaattttacatctttcctgctttctcttatgggcatttagtgctataaatttccctctacacactgctttaaatgtgtcccagagattctggtatgttgtgtctttgttctcactggtttcaaagaacatctttatttctgccttaattttgttatatacccattagtcattcaggagaaggttgttcagtttccatgtagttgagcggttttgagtgagtttcttaatcctgagttctactttgattgcactgtggtctgagagacagtttgttataatttctgttcttttacatttgctgaggagtgctttacttccagctatgtggtcaattttggaataagggcaatgtggtgctgagaagaatgtatattctgttgatttgtggtggagagttctgtagatgtctattaggtctgcttggtgcagagctgagttcaattcctggatatccttgttaactttctgtctcgtttatctgtctaaggttgacagtggggtgttaaagtctcccattattattgtgtgggagtctaagtctctttgtaagtctctaaggacttgctttatgaatctaggtgctcctgtattgggtgcatatatgtttaggataattagctcttcttgttgaattgatccctttaccattatgtaatggccttgtctcttttgatctttgttggtttaaagtctgttttatcagagactaggattgcaacccctgccttttttttccatttgcttggtagatcttcctccatccctttgttttgagcctatgtgagtctctgcatgtgagatgggtctcctgaatacagcacactgatgggtcttgactctttatccgttttgccagtctgtgtattttaattgaagcatttagcccatttacatttaaggttaatattgttatgtgtgaacttgatcctgtcattatgatgttagctggttattttgctcattagttgatgcagtttcttcctagcattgatggtctttacattttggcatgtttttgcagtggctggtaccagtcgttcctttccatgtttactgcttctttcaggagctcttgtagagcaggcctggtggtgacaaaatctctcagcatttgcttgtctgtaaaggattttatttctccttcacttatgaagcttaatttggctggatatgaaattctgggttgaaaattcgtttaagaatgttgaatattggcccccactctcttctggcttgtagagtttctgctgagattcgccgttagtctgatggtcttccctttgtgggtaacccgacctttctctctggctgcccttaacattttttccttcatttcaactttggtgaatctgacaattatgtgtcttggagttgctcttctcgaggattatctttatggcattctctgtatttcctgaatctgaatgttggcctgccttgctaggttggggaagttctcctggataatatcctgcagagtgttttccaacttggttccattctccccatcactttcaggtacaccaatcagacataaatttggtcttttcacatagtcccatatttcttggaggctttgttcatttccttttactcttttttctctaaacttctcttcttgcttcatttcattcatttgatcttcaatcactgataccctttcttccagttgatcgaatcggctactgaagcttgtgcattcatcacgtagttctcttgccatgtttttcagctccatcaggtcatttaaggacttctctacactgtttattctagttcgccattcatctaatcttttttcaaggtttttagcttctttgcagtgggttcaaacttcctcctttagctcagagaagtttgatcgtctgaagccttcttctctcaacttgtcaaagtcattctccatccagctttgttccgttgctggtaaggagctgcgttcctttggagggggagaggcgctctgatttttagaattttcagcttttctgctctcttttttccccatctttgtggttttatctatctctgctctttgatgatggtgacgtacagatggggttttgatgtggatgtcctttctgtttgttagttttccttctaacagtcaggaccctcagctgcaggtctgttggagcttgctggaggtccactccagaccctgtttgcctgggtatcagcagcagaggctgcagaacagcacatattgctgaacagcaaatgttgctgcctgatcgttcctctggaagcttcatctcagaggggcacctggccatgtgaggtgtcagtctgcccctactgggaggtgcctcccagttaggctactcgggggtcagggacccacttgagggggcagtctgtccgttctcagatctcaaactcctttctgggagaaccactattcacttcaaagctgtcagacagggacatttaagtctgcagaggtttctgctgccttttgttcggctatgacctgcccccagaggtggagtctacagaggcaggcaggcctccttgagctgtggtgggctccacccagttcgagcttcctggctgctttgtttacctactcaagcctcagcaatggtggatgcccctcccccagcctcgctgccatcttgcagatagatctcagaccgctgtgctagcagtgagtgagtatctgtgggcgtgggaccctccgagccaggtgtgggatataatctcctggtgtgccgtttgctaagaccattggaaaagctcagtatttgggtgggaattacctgattttccaggtgccatctgttaccacttcccttggctaggaaagggaattccctgaccccttgcacttcccggctgaggcgatgcctcaccctgctttggcttacgctcggtgggctgcacccactgtcctgcccccactgtccgacaagccccgtgagatgaacccggtacctcagttggaaatgcagaaatcacctgtcttctgcgtcactcgcgctgggagctgtagactggagctgttcctatttggctatcttggaaccgcaaacagtatgtttttcttacattttttcctttacctttttgtttgacttacaggggtttaagtattctgtattatcttgtttttattaaacctgttctagaaataaacttgttgtctctggagaatattcagttttttcaacctgtttgttggtctgaaccagtgttgcactggtattatttcagtaaaactacaaaaccttaccaaaatcctttcaggacacttaactctaagattaaattacatttcaataaatattaatcactgtaagtaacaaaatatttgtctcattcaatggtccattaatttcaagtgatttctaataaacttccaggataaaaaaatttggaccgtctcagcatatggtcacagtctgacctgtaatatctgtatcttatgaaaaatgaatacgtttatattccctgttcatttgttcagtttttctcagctgatgagcagacagaaatgaaaactagttattgaatctgtactagtctcatcaacctactaaaaaaattgaggcctgacagactcatatcctgtctaacccaggtaatcatccaaccttctgaatttctttggcaatggacatctgtttttaagagtgaatactgaagatgtttgttttaccaagtttttagagtgtgaatttaagttacacacgcacacttaaatgtcagtggtttcacatttgacaactgaaattaagtagtagtctttgtacacactttaaaaaccacctaccagttcagttaaaattgtaggtctattaacactgaaattatgtcgcttgtgtactgctatatccagtgcagctacaccacattgtcgattcagagccaagggattttacagattttaaagtgcgtttatttgacacaccacaaagtcatttaatgaaagttaaggaataatgatcaaaacatttatctagttaataagtaattttcagaaatttggaacagtacgcaagccatactatttctgaagttctacagaagttcaaacacaatgattcctttcttgtcatccgtttgtccctatttataatattaaagcataactcaaaagtatatggttactatccctttagtaacccataaaatgttggaaggtgtttagatgttctttagatttttgaaaattaagtattttttagaatacacatgggtaatgtcaacatttttggaaatatgatgtgcagacagaccttaattttacttgtatgtgacctagggataccctctatataatagcatttgccttggaactgctgctccttcagctgggtgctgaagaccttcaccttccttcttgggccatcccttacttcccatttcaagccagtaatattaaggaggacatataagtggcaacaggaaaggtaggggacagttttgccaatttgccctccttcaccccctgccccacttcagacagtttcattagcaagatccctgctcacattataaggcccattctgttccttacccatgcacagctcaagtttctgcaacaaacgctggcatacgttctgaaaagtttcccataaaacagacacttaacttcagttgctttctgagtcttggttgccactgcccgacaggagtatttattctctgatctcaccagcagggtgcagtagggagaaaagttgccctataatttcttggagtacagaacacatacagatacggtttggttctgtaccactgcttacctttcagggcccctatggtttcagtaagctttgagggcacaaactaagaaggctaacaccaagagtattgtttgcatgggtaaatattactaaaagtcaacatacaagtgaacttttagagcatattttttatttgggaactacctgaaatacccagaaaactatgccaccactttaacaatccaaggacttcaaatgttttctaaaactctctctacccaagtagacatgcaaactttgatctgaatttcctgacatttccttatttttctgtttttgttttgtttttttttgagacagagtcttgctctgtcacccaagctggagtgcagaggcgagatctcggctcactgcaacctctgcctcctgggttcaagcaattctcctgcctcagcctccctgagtagctggacacgtgccaccatgcccagctaagttttgtatttttagtagagacggggtttcaccatgttggccaggctggtctcatactcctgacatcgtgatccacccgcctcggcctcccaaagtgctgggatttacaggggtgagccaccacgaccggccttcctcatttttctataaataattttagatagtagggtaaatggagttcttatttccaggaatttgaaaagctcatattcttttgagaaatgttttcccaggcaaatttctaatgcagctattcctctacttttgaaatgtccatccctcagctcaaaagaaagcaccctgcaatttagattctttttttaaaaaattaagtttaaactggaaagggatagttttagcttgttccacatgaaatcttgctgataagcaaattcaactacatttctatccaaaagagttcctttaaaaagtctgacttacagtcaggcatggtagctcatgcctgtaatcccagcactttgggaggccgatgctggcagatcccctgaggtcaggagttcgagaccagcctggccaacatggtgaaaccccatctctactaaaaattaaaaattagccgggcgtaatggcgcacatctgtaatcccagctacttgggaggccaaggcaggagaattgcttgaacccagaaggtggaggtttcagtaagccgagatcgtgccactgcactccagcctgggtgacagaacgaaactccgtctcaaaaaagaaaaaaaaagtcttatttacaataatttcctgtttccatttctttatgcaaatctcaaataataaacctgctcttggcaagctgcagctaatctccagtttatattactgtacatagttgtatatttaaattttcttaatattgtgaacatttaacatctcaacccttctgaaatgactgatggtgaaagcttcacagaaaagctggccacgtcatgctgtcgccactcagtcccacaacaccacactctcctccctcctcctcctgtttctggctagacattgctttctggacgtttctaaggaagcacaggcccagcttctaattcgaccaaagggttttaaagtctaagttctagcattttctgaatgcttcacagtagatgttccagaagaaattaatgactacaataagcattccaaatgatattctaaaatgaggactttctggctggacacagtggctcacgcctgtaatcccagcactttgggaggccgaggcagacagatcacttgaggtcaggagttggagaccagcctggccaacatggtgaaaccccgtctccactaaaaatacaaaaattagccgggcatagtggtgcatgcctgtaatcccagctactcaggaggctgaggcaggagaatcactcgaacccaggaggcagaggttgcagtgagccgagatcatgccactgcactgtagcctgggcaatagagcaagactccgtctcaaaaataaaaaataaaatgagtactttctgtgctcaaaactaccaactaagctaaactatttcatcaaaagaccccactaatcaggaaaactgataccagagataccaaaattgatcagtggaaaacagtggtttataactctacgttttgtggaagtgcacattttgataattcttattaaaagacactaagatacatgaagcattgtgtaagtttggcagacattaatatactcatttcagaggcagtaaacctatgaacccttaatgttctagtttgctcttgaaaatgatactatttcaaagctcagtaatgtggatagatttttattcagaaatcctttcatattcactaactgcaattaaaagtttaaaattacatggctcttaggaatgacgccaaacatgcaacattttaagagtaatattaaacagtaattttgccctcagaagtttacttatcaaattattacaacaggaacacaaatagaccacatattactctttaattagatttgttttacaatatgttcttgtcaacgagctatgtcaaactgtttgtttaaacctgacagaaaagcattttcacaaaaacgtaccatggagagggagggggaggggaagaagcactttttctagagatggaaaatagttccagtaaaaagttcttattcctttcttctaaggagctcgttctgaatattttcacttagttctactgttctttaaacaggactttaaaaagaattttgtatttacaaaatttacattttgttcctacaaaatgtaattttttaattttgtaaaataaaaatgtaaaattttaattttgttcctacatgagaagtgtgcgtactttcaattagttttcattaatatcttctgagttttcctcttaggtggttggtttctgggtaaggcagagttaggctggtgcacacactatttaggaagtcctgtctcgtggctgacaacatacatgtagtgctcaaggaagtgagttaaggagtgacatgggaatcaaaatgatgcctagaatagtgtaatttgggaaacagccctagatttgacattttggaagttcactgtaagaagagaccccaaaaagaaggaaaagggaaagggttcctcagctaaatatcccactcatccatgcctactcagcggtcactgtgacaaggccatcttaatcggggccagagatgacactctccccctgtaactcagcctggctctgtctattgggatgtgcctaaatgggatgggtgagggggcactaaacagctaacactggccagggaattattaaggagctaaaatgcaagtacctcttgaataccacagcaatctctgtgcacaaatttggactgtactttttgggagaagaggtgaaaactattattaactattcccttccttcaaccaaaaggaaaaatacgcctctttaaggcttcttttaatgatactataatgctgaatttatttatgaaaaagaaacaatacaggttgaggtgggaaaagccccaaggaaacggagtaagtcactggcggtcacaggacttgaattccctggggacagtgctgtggggtcccctgctcgccatcccagcacctcagtctgagtatagataatactgcatttttgtaaagacgaaggcatcctgcatttaccatcacactccacctactcttgtcctagtcatcttacatactcttagtccttaatctctcccaaaacgcttctcagcgcccattgttattgtgtcatctacaaagcaacacatatattaaaactcagatttgtttttaacaaaaaagtgcttaaaaccaccctaggcaattgtttttcacttcattttcaaccaataaaatcaaattcatttagatctatgaataatactgaaaaaataatgcttattctcttacattttaaataatgtgccttcatcctcaactttacattaactgactcatttcagtatctaaatgaattgagctctcatttgaaaaacagaaggtacaactatatagaatttttaggataaaaaatgttctggatagaaaaatccttttgatgtttcaaaataacacagattctcagtatagttttcagtttggcaactaaaccattattaagtacccaaggtttttaaaaaataacaaaagataataacatgatttttaaatacaaagttatataggagcaactcatatctgtggatcatccttacacaaagttgtttctcactagaaaaatccctaaatatttgtcataaaataaaaactccattatcaaaaattagtttaagatagaaatctatgcactttaatgattgccagaattgcccagcatagcttcagtaaaatagagaattgtctagaaaatacaatctccaaaatgtgtgcaagtactgcaaaccggacagaccggggcagggcaaggcccttgaaaccaagtcctccttgagcacctttcccaggttagaaacccctcttcagcctgtgcttcgcacgtttccttcagcgtgccgccattcagactgcgccacttacgtcccagtgccacgctgcgtggatcaagtgtcaacgggaaagtatgagttaggcaagcgctttttttttaagctgtaaacgcttcacatgactggccccgtaagaaattgtgggagcttagatgagcctggagcttttcaggaactggatgaggactctgtacacaaatgtgtactggcagagagtctgcaccagcatcattctctgttgcctcagcatgtccagcactctcgggatgtccagcacctaggttgagagaaacggtaatgaagataatgtgttcccctggggagacagaaaggatgggaggacacgagtgtcctggcagaaacctggttgggagatggacagtctcttttccaccttagcgtcttctagaaataagccatgattgcctacttctgattttctgattagttttagctataaatagaatgtccatgcagactatttcttcaacattccccaggtgtagctcactgactttgtatggttggacataattaccatgtctcactaaataccaaaattatacaaaaacatagtgtgctaagtgctatcagtatctagctatttccctcaagggctctgggcagcatgaatcatccttgaaatgtaaacagaaaaagaattctgagctcaaatttgaaaaaccctgggcaagtaaaacaaaattaaacagctttatttatcgtatgacttcttagtctttaatatgctaattggtactgagactctccaagaagacacagccttttgcagggaacattagtaacatcttgaggccaccacagtccaaggaaatgtgcgcaaaaagagctattaagtcactatgtccctctcttccccagcctcatttccacccaaaaaggccaggtgatcataagcgccatcacctcattgtgttccaggcaggcgatcatgatctccgacaaaatcaccacgccagtccttcctaccccagcactgcagtggaccaacaacggagggttggggctttggggatcacttgtgctatttgtatggcgtcgaacagactggatctcttcaagatatgctgtggaaaatcaatgaaatagaaaagtactcaaggatcaaggcgtatcacattgttgactcaatcttcatattctctccactgattaagaggactgcagataaagagcactgggtgccagtgaaccaaacccaaccacaaagggacagtgtgaccctgagcaagtcactacctctgtccactttctgatctacaaaatgaaatgacggagatactgagtcagctgtggcattctactcactaccaaatcataatttataaacctcgttaaccctccccaaaacacttgtattctttatgttaaaacaagtccgaagcttatatgagataacataaaggaaatatttcggaaacataaatgttcctctctgtttaacacctccagaggcagctgtcctcggaacaaagttaaagtcactcacataaaaatcccttgaggtcttctggacagccatgttcaggccagtctgtgtattggaggtgccagacggtcctctcttgcccagtaaggaggtgcttcatcttcaggcctgtggtggcatagcagccagagtctgtgcggaaccgggtcgtgatcttaaaccttccataggtgacagtgttgtgcctggaaccaagtcgtggccagtacctaaagctcttctcccttccaccctcctgttaaagatgagcatggttaaatgactcgagatccggcaatggatgcctttctcacatagacggcacatctgaaacagaaccacaaccctaccctgcctttttctccacaggtcaggattccagatgattaacattaactgttcttcagaggctgagaaaatcacttaagagaaataagtacctacctcttctgctgtcaccattgctataattgcaattccctgttcccataccatctgccaaaaatcttgacaggtattctgtaatggtccctgtgtggcaatataatcccattcgattccactgacagagacctgggattagaaaaggttaaaaaaattgatgtgtgggtataatatacataggtatgtatgcatgcattcatggtagtactaaaaaagtttttttaaaaaagtaaaaagtaaaaaagtagtaaactggattattcagcagaataaggaaagacttttcatcttttcccttgtgaatacaatttgcattactgacatttttataaacttaggtactgtgaatatacataatatctatgcaacctgtttaaccttgctgaatgtcagttctcatttatacaataaagatactgcctaccgtcatagggtcattgtgaggactgagtcagtatctatggtacctggcacataactcaataagtagctgttattgcagacatggtgcctcttctttaaaaaaaaccttcctacttaagatagtctcacctctgaacttctgagtcaaggtcactctccacaataatattaagtttccacttcagatttaacttccttgagagcagtctaatacaacagtaattactagatttgtggttaagagacctgggttaaatcttggcttcaccaatattgagtgacgacaataactgtctccaaacactcactaaacgtaaaacccagtgccaagccttgtgccacacgcactctcactcagggctgccagccccctagtcaccgctccacatcgtctcactgagcacccagtggctgccactgtggatgagtaccaggttataacagtgaataaacactagggaggaggaggggactagtgagaagctggcagggtaggtgtcatcatttatttatttccatgtaagtgagatgaggtcccacaacacagcttataaagtgaggtcccacctcattttagatctaggcgtcagacccaggtctatcaaattctttcctctattctgcaagtggctgctgaagattttgaaatatcactacagaactacagtatcattcattcttatccatctagtcatgagagactggatgagttatttcaaggaaatgctcggtttttaagtaaattatgctgatattatatttaaaaacaaaatagtatgtgcatagattcccaaaagccatcaaggggtactggcattcacaggcagactgccagtctccagaaagccttggtgtcagcttgttcccttctcaaataatacttgcaaactaaagaaaaaaaccaccacctgtccacagttactcattcactcaccatgagatttctccttcccaaaataaagaattgaatgtggccagcatgaacaaagggtacaatgaggaagagggaacatctggctttattccatcatgtgttgtgaatcatcattttgtccattttcataggagtgatattaccccagataaggtgccaagaacatacactagggaaggacagcctcttaaatacatgggactgggaagactggatatccataagcagaaaagtaaaactggaccccctatctctcaccataaacattaccccagtttaatggcattatactggttccaggaaaaaagcacttcttcaaagaaaaaaaatgatacttaaaaattattataaagagtatgtaaagagaacagatggcaccttggtaagttgaaagcttttgtgaacaccatcaaaaagcccagacacttttgttacataaaaatgcatgtcagtatgtgatgaggaaaaactagcaattcagtggctcccagaatttatgagctaaaaagaggtcttcagatttagaaggacaaagttctaaagccaggcaacacaaggtcaaggctgtagggagccatgatcataccactgcactccacctgtctgggcgacagagcaagactctatctcaaaaaaggcaaaagaaaaaaaaaaaagccgggcaaataagtgcgccctgagtcctggtaacagtgttgggggcagagtggtttcgcacatggagagtagacatgactttggctctgtctgatagacgctttttatctagcactggtatgtggatttcccagcttgcagtacagtttgtcacaaatgtttaaaactagggtgtttatctaaaacaatacaataaaaataaattttaaaatatctgaattctaaacagacatgaatacaattcttaccattcttgtaacttaactgaaactgcatgtgctgttgattacttgaggcgttcctctcaccttaatatgtgatgcgttgatgtaaccagtgttgttttctttagttgggaccaactccactctcacatcatcataaggaagaacatcttggaatcgatttctttctgcattttcagggagtcgtgctgttgagcactccccatcaactagccgtttcttaagaattctttcatattctgtgaataccattccttgttctaatcgttgttccagaattttacactataaaacagaatatgtgtaataacatgaatacagccacacgtcgtggctaccttttgactgtatatttgaaatcttgttttctgcttcaaatctagcactgtataatattgaaaattctaggttgggcacggtgtctcatgcctgtaatccctgcactttgggaggccaaggagggaggatcacttgagcctaggagttcaggaccagcctgagaaacacagtgagaccccgtctctgcaaaaaattaaaaaacgagccaggtgtggtggtgcatgcctgtggtcccatctacttgggaggatgaggcaggaggattgcttgagcccaggaggttgaggctgcagtgaaccatgagaacctatctcaaaaaaaccaaaccaaaaccaaaacagaaacaaaattctaggtgaaaatgaagttaaaattttaaaaagccacaacaacaagagttaaaagaacaaaagacaatcattttggtgagaaatataatgcaaacttttgtttaaagttgaaaattggcctaaagaaatttgttgaattcattttctctagatctgtggtcaattttgtgacccctaatagatggaattctcctggggaacagtaagtaaatctaggggacggataatgagttccaacagctatgaacaaatgtttccattttatgtcatacgatatataaaagactaaagcagtaggaaatattcgaaactacctccaggatcccgttgtaaagcaaatgtatgcctatctgattttgatgtaataaaacctcatagaaaatacacctcaggcacaaaggaagttttgaaaaattgagaaactactctcgagataaactttcagtataataaaagtcaatgtctgctgcttttcccctgtatgctcctgtatttttgtagatttcttctcactttaaggccatcaaaatcaagactgctccaaaaggccaggagaaggtaaaaaagaacactgagaaacaaacaaacaaaaaatcagcattcgaacctgaaattatctattaagacattagctatacatttgccccaattttgaggcccatattacaaaattccttaacactcatttattattaaattgtgttagaaaattcaccaaaatctcatgaaggcatttgcgtagtatttaccggttgttccagagaaggcacaaagccctgtgtgtcccatacataccctttcatcattcgttgctctggtagccacttcctttccttcatcaggcagaggcactcgagatagggagagtccatttagggcagccagtttaagaggaccaattttttttgcatctactcgagtctttttcattccctgtaaaaggatttatatgtatatatgaaatatacacaaatacaacccctgtgaaaagaagtttcaatgcactgaagaccaggaacacacagagggagtgttctcctttgccaataaacccagaaagattacactccttcacacaccacttgtttaacaaacattagtaggaagacattcctttcaaggccaaagccctgataaagtcttccagatagaaggttttgaaacactattggttacaaagttctgttgtaatgaaaggtgaggctccaggcagactgcattccttttaaaacaagacagacgtaacaaatcagctgaagtccaaaaaaaaaaaaaaaaaaaaaaaacaaaagctttaaatgcaatcaattgactatagtaagcttttataaattttttttttgagggtctcactctgtcacccaggctggatggaatgcaggggcaccatcatagctcactgcagcctcaacctccagtctcaagcaatcccacctgaacctcccgagtacctgggactaccagcacatgccaccatgcccaactaatctttgtgtgttttgtagagatggggtctcactatgttgcccaggctggtctcaaacaactgaacttaagcagtgttggcctcccaaagtgcttgagattacaggcgtgtgccaccatgcccggacagctttttataatttttaaaatatataaattctttaagtcattctgaaaaattaaatggtttctgcagcagccccctttgtgtgttaagccccctcctcatatgctactctgcattctagtgcagacttagatgacccgggttagatcacgctacctctcagaacggctacgtttttaaacaaggaaaataaaacagggctaaaatctccatcatgacaccaggaggataggacagaagagaaagcatcaacaaaatcttgtctcctgaaatcaagtgtttcctaaaattattattagagcatgattttcctctctgagaatagtaagcataagaacactaagttgaccaggtgcgggggatcacgcctgtaatcctagcactttgggaggccgaggtcaggagattgagaccatcctggccaatatggtgaaaccccgtctctactaaaaatacaaaaattagctgggcgtggtggcacatgcctgtaatcccagctactcgggaggctgaggcaggagaaaggcttgaacctgggaggtggagattacagtgagctgagatcgtgccactgcactccagcctggaggcagagtgagactccgtctccaaaaaaaaaaagaacactaagtttcgttggatatactacacttccttggatgatatcaatataatgagtagccccaactggaaaataatggttctgccctgtaaacaaaatccgtgttattccagctctctcagcctgtaacaggccatgaagccccatgataatggtgcaagaacagagggaaaaggcaacttggtgagagaggaaaaaaatcctaaaagattgctgctgtaattggagactgtgattggtacctaactcaataagctaagtggattaatttttaattttataattaatatttgatcatgagctccccacataatgcagtctagactataaacagcagaggcctgggttcacatctggcctctaactgaccaacttctttcaggcaagtcacctttcctctgtaagcctcacctagacagaaagagacagatatatccagacacaggcatacagactaaacacttcctgcttaggctgaaatttaatgattctaacgtgcagaaaacagtgatgtgctggtaatatttaacaacaggctcttggaaggaagttttgatcggtgtttgcccatatccatggtgtaaatactcccatcacagccaatttcaaactgttaatgtcacatcaattggctcacaaggttcctgaacatttaagtcggctcttgctagtcaatatgaactagctctggcacttctctgcctgaaaatgactcaaaatatcccacactgggacacgctggataaagctgattggctgtgaggtcagttcaaaagccagtattggaagaatgttgtatgtagtcaaaactagccttgaatatgccttaattagcccttagaatataagcacaggattttaatgcataccctgcacagtgatttcttatgtgagaaccactgcactaaagggtacaacaaaaagaaaatctttatgtagatatatgagcacccaaaccagtctgcctttaagataacaatcaggttgctggaggtggagatgggtggagaattctaaaatcattcctacttgtctacagtttatttcactgtttttaatactaaacctccataaccttaattcacattaggaaatttgttgtaacgattaagataatggcaaccccatgttactatgaaaggtcagagggtacaatagggaattggcctcttccactcttgaaagccattaagttaaatatatgatgccacctcacagtaatgttaatattgactaatctctttcaatgtgccagaacctcatttttatccccccaacaactctctggggtcctctcatttacaaatgtaaaaactgagtcacagattaaatagcttgtctgaggtcacatggctgcctcttttacaaggtaatcagtgtcaaaacaaataaaagcaaatctttggttaaaatcagttacactgaatcatgtaattcaggaggcattttttcatgcctaactgcatgtgggacataatgccacgaagcaggcagcgaagggatgaccgtcctcatgatctgaggttatctgatgtggaagctgaggttctgacgcatgaagggtcctgaccgtggtcacagagaactaacaaatggcaggctctagactcagccccaacgttcttaacttgtaggacctttgctctttcctcgtgaccacagctgccatacccattccttaagtagaatcctttaagcaaaaaggaccaaaaacataatccaatcacataattttactagtattgtggtcttaaaagtcaatgggagagaaaagttcttttaagagaaccaaattgatcaaagtcctcagatttaactgaacctaccagaccccattcaaaacatacagggataaaataggcctgagtactgagctgtactcagatagcatttggggaaagtacgtgagtcacacataaaaacagaccgttcttaatgcaatgggaagggtgttaactataaaaggaccctgtccagctggctcagggattcaggtagagttactttggaaaatctacccacaccttatcctgaatcactgctccctacactcttaaatctgtgtccactgaaggcattggcctttactgttcagggatgtgagttatgttgcatacttgtgaaaaatttaaaaatcaacttaaaattcaaacccaaaacttattaaaagaaagcaaatttaggccaggtgtggtggctcacacctgtaatcccagcactttgggaggctgaggcagccagatcacaaggcaggggaatcgcttgaacccaggaggcagaggttgcagtgaactgagatcacaccactgcactccagcctgggcaacagggcaagactgttctaaaaaaaaaaaaaaaaaaaaaaaagcaaatttaaatctgtggtactttttttgttaagtagtttttgtctatgtacattaatctctttcataagtactataatagtgtgcgttttttcctgtttagcaagatgtttgcagcatcttaaaggatgtcatacactaggccagaaccacacttgagatgagccgtcctgtcggagtttgcagtttagcagcgatggggggaggagaaccctagttgccaggacactggaagccaacaggagaaaggatggaggccctaatcaagttagcctggctcaagtgcagggcatgaggagtggagatgtgggccaggaagagctggaagcctgagcactgcaacaaaatcacttcggtggacacacttcatgacaaggccgcagatgcttagtcccaggttaaggactgagtttaaaagtttcagtgaaagactagcaaggcttcaacaagcaattatgacttaatagaacatatacagtatacttcaatgcagaacatacatctacagtgtagatgataacagaatgggcttctaagtatgggtttaaaattccagttcagtcactcactagtcatgtgaccttggaaaagttagttaatatctaagtctgtttcttcatctgtaaaacaggcataacaataggcttactgtaaataggccacaaaagtagaggaaatgcttggcccatggcaaatgctccaaggatggtagctagagatgatgctactatgcttttttatattttgcttcaaagtaggtaaaaagtgcttaattcatatttatttattaggctgaatattaaagaactgcatcttctaccggggactttccttagattctcagctgaattcatctttcttttaaatttaagaaacctggacgtctcaggatttgccttaacaaagtgccaccttcccaactccagaatcactctggagaatcacggccaagatatgtaagctgtatccacacacactccaacctggagaattatattaggattgggtacactttcctggatgcttttttcagatatctcttgagcaaactaaacaaatgcacccctggggtgccacatcacccacagtatttttaatgggtggctaaagcaatcgtggctaaagtaatgaaatcttaactgtctttcccttaacagtgcattactaaaacatttcattcatcttttccatttcgacaaaaccctgtgaatttaccttttcacttcatctataataattatctccagtaaaaccactaaaattcaagtggatccccatgatttccataaatttaaatgtgttcagaattagacaaaaagagagtgacgtgggggaatgaagaacgttaaaagaacaagaggagctgaaaaacacgggacgtgatgagtgaaagaagcgccagggcgaacgcgcggtcccctggcccggcactgctcgccgcgtggcttacccctagaggcgggagcccttccacgatgttcttcttcccagagagaaggtccgacaccggccttttcttcagagagtccctccgggctcggtagcggcctgacgtggtgaggtcggactccgacatggagggcatcagcagcccgtctctccagggccgctgggcctctgcggtcgtgcggacggggctgctgtccatcatcctcttctccgcgtctgggacgtgggccttgggctccaggatgtgcaggggcccggcgagcaggacgcgagggcagccaggtgggtcctgggccaggccgggccgaggctcgcgcgcacgtgcaggaggcgcccgggccccgctctcctcctcgaagtcctcgtcctcctcctcctcgctgctgtggattagcatggtggcgtccgacagggacttcttatggccgtacctcaagccctccgcctcctccggcccttctcgctgtgtcctctcggtgaaaacgctgggctgggagcccaccgagacggctcgcggcgccacctctgccgccgacgcggatagggtgcgctccttgagccgcaggccctccaggccgtggctgagcccggccacctcgatgctgttccgtttgtgcagctgcgcgtggcgcgcggcggtgaggggctcgctgacctcctgcagcgagtgcgccacgggcaggctgtcctcctggaacgtttgcaccgagtggtgcacgcgccgcgtgatgaggtcggggttgctgctgctgatgtaaaggtggcgggacaggtctggcgtgctgttggcgggcctggggggcgggtagggtgggggtggccggtacacctgcgtccgcatgatgttgggagacgggtagtcctgcgcctgcagctgcgcattggtcagctccggcacgctgaccgcgcccaccacgggccgccgctcggcagggtaggggtagggagacgggctgtggaagctgtagctcaggctgaacgggcagtgtgcggccgctggcgaggggagctgtgcgtgctcgcggatctcgggctggctgtagaccagcgccgcgggcctgctgtaggcgtacgagctgccgatgttgaggtttcgcagcgagtggctctgccgttccgcatgcaccaggcccctgttgagctgcttcatcacagtctcatagtctggggtggggcggtaggacgggggtatcacggcgctgtgccgatgggacgggaggtagtcaggcctcatgacgtcactcccggtgatgctagggttggacgacatcggcgagggctgcaagtagggctgaggattatttaaggagttggtgctgtgtgcactgtagacactgccattacggatccgaccgttgaggtcaatctgggctctatccaagcttgtctgagagtgacagtagtatccgttctggttgggcacaaagaggttatctagaaaaaatgagttcaaaatgagatttttttaaatggactaattactccaaccaaatactgagatcggcccttacctctgatgacatttttaacacagcttgtaaaaatccccgctagaatgacctagctttagccacactatctgagtgaccctgggagcttcggcttcctcatctataggatgggcatggctctgcctacttaaggggtggcattcattgggtgacaaagtgagaccctgtcttaaacgaaccacacccacagcagactagcagactttttggaactctggggaagttgaggcagagataccattcaaggcactgggctggggactctgcctttcttccctgggtagggatgtggccttgctgctgctgagctagttcaagcaccaactgtctgtaagcatttccttaactggaaatttttattgttcttcccaaatgaatatgagagcttcgactgtaaaagggtaatggtatagcaggatctgaacttctctggtccaacagtgtcaccagcagccacacagcccataaagtgtccagaagccaagaggagccacattaaacagctgcagctgccccctgccctggcccccatgtttcaggaagatccagacctgcagctaacagaatcagtttaacctaatcttaaaatagctatgcatgtgtccctgcccagggatgacaggggccatgtttcttctagtcaatttgtagctcacctgccctctgttactgaggatgatttctaaccctagatgatttctaacactcagcagccaactccttcaaataacaatttcctctgaaaggcattctttttgtgcttcgaaagctccatggtgatttatgtgatcatggtgatacttaagtaatacaccacaatccagtgggtacactttattctggtggcacatgcagctgtgaggaaatagcactcaaatctccatggtattcttctgctgacacacagcacttccatgtcactgtgctttcctcatttatgcaaagcttggtcatggctccatctctgcaatccccctttcctcactgctgccacagctcgggcccctaccccagcttgtctgaactagctctatatacacctagtctccctgcttctgcaccccacaaaccatctagccatttatgagactgttatgtggaaaaggcaatactaagaatagaaggaggaaaagatggttggaatacaggcaagaaaaggggaaaggtatgcatgaaatcaccataattcaaggaagggagaagagatgaagggttacaggagtccagaggaagaaatgctcatttccagcctgagttgggttgatggggacaaggaagagagaaccaagaaccacctcacaagatatggcagttaaggggacttgaggggtaagtgggtggggtgggcgtgtccagcttccatcagaagtgaggtctctccacctctcagagcacgcagggttacccctcctcaccccttgatatcaggcacaacaatgcgactagtaatggtcaagggaaagtgcacagagggttaaaagccagcttccaggctctcttccaactgcaacactgaccaacaacattccagagagaagagcctctccagctcaagcccctacggcagactcagacagggcagagccctcctgctagtacagtgtgcaacggacaggtgacctttattattacttccctgagagtttggaatggagtattttgtcagcacagcatagccctgcctatccggtctgcatggcagcatgtgaacggaagggtgcatggggtaagggcacctgagggtgcagagcggcactggcaaagccagggtgcacccctgggcaagctggggtggctagagtgtcagatagctacagaggagtaaaataacttgggaagtaaggttggaagggcaggctcagggaatattgtgtggagtctcgaacaccaggcaaaagaatgatcctgcacacagccgtgtgcagtggctcacacctgtaacactagcactttgggaggccaaggtgggcagatcacccaaggtcgggagtttgagaccagcctgaccaacacggagagaccccatctctactaaaaatacaaaattagctgggcgtggtggcgcatgcctgtaatcccagctacttgggaggctgaggcttgaacccaggaggcagaggtggcagtgagctaaaatcatgccattgcactctagcctggacaacaaaagcgaaactccatctcaaaagaaaagaaaagaaaagaaaagaaatgttaaatgtagatgagatccctgggaagctcacagagggagggaaaaagccacaggacagacctgcagagctcaccaaacaatactgatgggaaggaggagggaaaaacctagcatgccaggagagtttccagaaggtacaaaggcttgaatgtgatggtgaggggatgtgggggtgctgggaggctcccagagggccgctttaacagagtggcaaagacagaggagtgggcgggtaaccagcaagcagaagcagcacacagagagtactcttataagtcagtgagaaagggctgggcacagtggctcacacctgtaatccccactttggaaggccaaggcaggcggattacgaggtcaggagatcaagaccatcctggctaacacggtgaaaccccgtctctactaaaaatacaaaaaattagccgggcgtggtggcgggtgcctgtagtcccagctactcaggaggctgaggcaggagaatggcgtgaacccaggaggcagggcttgcagtgagccgagatcgcgccacttcactccagcctgggcaacagagtgagactccgtctccaaaaaaaaaaaaaaaaaagtcagtgagaaaagaaagcagatcactcaaaccattacttaaagggaggagaatgaacaatattaagatgtttatagacagagggaagagaatgagtggcaaagtgagactaacaatgcagaggacagccaggtcctggaagtgggaggggccgggattgcaaataccagacaagggcagggtgcaagagggaggaaatacaagaacatggtgagggggatgctctcaggctctacacccaaagccctgctctctactacccacctcactgcatgaaaaccctcatcttttacaccagggccgacacaaacaatacagtcacatcccaccttctggtcccttcatgcatcactccctaccagttccttacccgagaggaaacctggaccactctactctccaaacacaccctgcttcattctgtgcctggcgttcactatccccaaaactaggaacagcaaccccagtcaagttcctgcctttctacctgctgaaatccacccatcttttcagatacagaaagttcttctcaatctccccaatgtgatgagtctctcttccactgaggagcatggtaattgcacatgctgtctcagaaaaactatcatattcaagttatttgtgccaggagtggtggctcaggcctataatcccagcacttagaaaggcagaggcaggaggatagcttgggcccaggagattgagaccaccctgagcaatatagcaagaccccattctccacgaaaaaggggttcaggggagaaagacaaagttatttgtgcacttgtcttatcttaaactattagattctaaggtgttttttttttttttgagatagtctccctctgtcatccaggctggagtgcagtagcacaaaatcttggctcactgcaacctccacccccaccttgggcttaagcaatcctcctacctcagcctcctgagtagctgggactggaggtgcataccactacgcccagctattttttttttttttttttggtagagacagggtctggccctgtggtccaggctgaagataaacttcttaagatgtggaaatactcatctgcataaacctccttagcatttggtatagccccatacagagagagtatagagtaaatgttaattgactgcttaaacttcagcttgggggtttgttataaatacaattccttatacttctcatgtgaaaactgcagtagtcatgtgtttaacttttacaataggaaagcctctggcagggaaagaaaagtaaccctgggaattctttgtcagatagcaaagaagcacttaaaggctaatagggtggtggtaaaaggacacaggaaccagcttgatagtttcccattggccaaatttgagaccagtggagcatcaaaatttgatactgcatgtttttacatacattcaagaacccaaatatacctggatcatctgaggtcaggagtttgagaccagtctggccaacatggtgaaaccccatgtctactaaaaaatacaaaaattagccaggcgtggtggcgtgcctgtagtcccagctacttgggaagctgaggcacaagaattgcttgaatctaggaggtggatgttgcagtgagctgagacacgccactgcactctagcctgggtgacacattgagactctgtctccaaaaaaacaaacaaacaaacaaaaaacaatatattggcttcttttatgaatccaggatagctattatcatgatgcaatttggggtgcaacttcagccaaaaactgtccaggcttcatgatctccaagcattcacagatttatccatagtcataactatgtaaggcatggcagaaacagtgtactttaccttgggaagaagcatatggttctgtataatgtccattatagtgcaactgcggtgggggaggcatcacgtagggctggggtttaggctaagaaatggagagtttgacacagggttgaaacacattgcttatgtaatacaggtaaagttattatccactggattctttctgttaaaaaaacttctaaaggaattaaatatattatatatggaaaataaacatgaagacacagtagttcttaacatatctagcatttctgtttccccaaatggcaatgtcaagccctatgactgataccaaggacattaggctccaccagaaaatctgcatctaaaaagctaagagcaagaagcaatagatacacatttccttgtagaaacatttcaacataagaagcttataggtattatagtcaatcttattaaaggcatctagtattttaaatatataccaacttaggattactcttggccaatagtctaagttcttaatattaaggtcagacctaatattcaaatatgtataatataataatataaatattaggttggacctatgggaaaaaattaccatttctttggttaaaaatgatgaaatatcaatacacttttatggttcaaactcaaaattaacagcattgaaagcatattttattcaggaaaaacatcactaaaataaaaaagcaatcatattttccttgtttcttaccagagacatccttgaagaagacctcctcctgattgggttcactgtgacagtctgagtttgcctataaaataggatgactctgagaagagcacatacacactctctcttaaattctaccaaaacaagatataggaatgtaaaataataaatcttctcaggcaaaaaaaaagacaagctatctaagtcatgaagtcaaagaaaagaagggaggttctctgtcggcccgtggggcctcagccctttcctgctgccccaacccgtcaacctgccctgtggtttcaggctccccacacagcatcatcgcctggacccacaaggggatcagagcatacttcccaggcccatccaataaacctctggattagccataagcagtggggaaagagacaaggctacatcacccacacacttgtcgcaggagaagctggattcagtgcaaatgcaaatgtgtttctcctatgcgctgggggagccctgggtccctccactaaccttcctcccgggggaccatccactgtcaacccagaagcctcaagcagtaagaactgcctttaattaaaagtctgttaaccacagactacaaacataatgaagaaatgaatttatgattttagtgacaagaatctacatttccaagtgcagtaagcatgctcctgtagacccgcctcttgggagcatcttgggcccaggagttcaagaccagcctagacaacatagtgagaccccatcttttaaaaaactcaaatataaaaaaatttcaaacctacgtattttttaaatctacatttcctctaaggaaccaagggaaagcaaagcacaagacttggttcagtgagccgatggtaaacccatttacctttctttgcaagaaatttctgatttgttttgaatatactttttaaaaaaacacctaaggccaggcgcagtggctcacacctgtaatcccaaactttcagaggccaaggcgggtggatcacctgaagtcaggagttcgagaccacctggccaacatggtgaaacctcatctctactgaaaatacaaaaactagctgggcatggtggtgggtgcctataatcccagctactcgggagtctgaggcaggggagtcacttgaacccaggaggcagaggttgcagtgagccgagattgcgccattgcactccagcctgggcaacaagagcgagattctagcctcaaaaaaaaaaaaaaaaaaaagtacctaaacgtattagggagtgctgacaaacactaatgtgataatgtgagattttcaactactcacacagcaagttctatctttaaaaaaacaataaggtaaaaaaaggaaacagacacagaaaagcccatttgtaactattgttttcaaataaaggcaagatttttttttcttctgtgtggtcagttttactgcaagatctaggaacctaaacacactggattcttggctttgttgatgacatgtagttttgtcaaagcactttttcttataccttttaccacctattcctggttcatgtacttatgtaacacataatcactgattacaaaaatattttgtgacctttggttacagtgttctaaggactaattactagaaaatccatcatgacaaagtgaatattcaatccatttaagcaaatttaccataatatcaagcctcatgtctcataaattaatattactcttagcactctgaaaactagtatcttatattcaaaaaccctgaatattagcttatttttataagactcttgagataaaaagaaaactagtacatactagttttaacatcaggtgattacaactgcttttactagcttttataaataatttcatttctttgttactggaaagtattcaggctgttaatgaaaaataaatgtctcttttccaaaagatattccattcttccagtatttattttggtgacacaagtctgcatggcgtgtctgggttttaaaaaataaaaaataaaaaataaaaaatactccttaactgcacattaatatattccttaaaattagtgcccacaaattagccaggcgcggtggcaggcgcctgtaatcccagctactcaggacgctgaggcaggagaatcgcttgagccaagggggcggaggttgcagtgagccgagatcacgccactgcactccagcctgggcgacagagtgagactccatctcaaaaaaaaaaaaaaaaaaaatagtgcccagaatttgaagacgctgcatttttgcagccttgaaatttactttgtctctggttattcttcattgtcaggactaggtttaggcaaactgggtcctctgaaccctgtgttcagtctagcagagactcactgtctagatggactgaacttaagaaacttttaaagtactacaaattcacaaggattgccaacagaattctctgtcaacaaactccaacaacatgtctacagttgcccagcctggggcaaaaataaaacacaaaacccaaggatgcagagcttcagcacatgggcggccctcccacactgagagcttatcttggcgctcttgccgcagcacccagtgtggaggcgaacactgcccactgtagtagccggctctactaagaaaacaaactacaaaagcgtgtacctgccaaagtgcttgacccaggcagccacgccatcagttctaatagtctaaccttctctttcttcttggcattgttcttataaatgcagtttactctgagaccagctatcctcagcttggcatacaagagaaaaccatgtaactgttggctgtggtttccaaactttttgggcagttactatgttgatgggtgctgctaaataactgagaagaaatcactagaatctgtgtgccaaagaagacaaaataaaaattaaaaaggctgagccaggcgtggtggcacatgcccgtgtagtgccagcgacttggaaggctgaggcaggaggatcccttgaatccaggagttcatggctgtagtgcactacgatcccatctgcgaattcccaccatattctacctgggaaactgggatactaggacctggtgtctttaaaaaaaagaaaaaagtctaccagcccaagtaaaatcaatattatttattgaaactgtgctaaggactgtacatgattatctcgtggaatgtgaacaccaaacccataagggaggtccagttattatcctgattttacagataaggaaagtgatacgtaagttcagtaagttgctcctggtcacatggcaaacaagtagtagaaccggcatttgaaccagcaggtctgtcagattcctgagtgtatgtgtctaacaatcatgtgtccaacctgctccccaaccccaactaatctgtaagctccgtggaggcaagatgtggtatccctggtgcctttgctgagcaaatgagtgactaacaagtgaggactaaagtgatgcttattactaagcatttacagctgagcttgtatttctaagcctcgtctgaattttgctttgtaagtttcctttcttatacgatgtaagggagttaagattttgataaacaaaaagatgccattgaaagctcatgcactaatagatagttcaaggaatagattccttcctgtaatcccaggtacttaggaggctgagatgtgaggatcacttgaggccaggggtttaagaccagcctgggcaacacagcaagaccccatctctaaaaaactaaaaaaaaaaattagccaggcatggtggcacacgcttataatcctggctacttcagaagctgagggctgaggccagtggatcccttaagcccgggagtctgaggttacagtgagctatgatcacaccaccacactccagcctggaagacagagcaagaccccgtctctttaaaaaaataaataaataaaagtgttagatggtggaaatacctagcaaatgtttgtctcaatgacttacaccttttgagctcactatagtaagggtaaggaagaataaatgctctcctcccagcctacacttgggtagaccagggctgcatccaagctgcttacaggtcactgacttggctctgggatgcctgcttccactgttcacccccctaccaaaccccgccttaggtgtagcttcctggcattgtgggatgggagaggaacaaagccagcagagaccatctcaggtaactgggaaggaatactgatggagggagaggccctagtgtcactccagccccatgaaatgtgtggttttctttttttttttttggagatggagtcttgctctgtcgcccaggctgaaatgcagtggtgcgatcctggctcactgcaacctccacctcccaggctcaagggattctcctgcctcagccttccgagcagctgggattataggcgcccgccaccacgccaggctaagttttgcatttttagtagagacggggtttcaccttgttggccaggctagtcttgaactcctggcctcagataatccacctgcttcagcctctcaaagtgctgggattacaggcatgagccaccgtgaccggccgacatgtgtggttttccagggtgacactgacctttatccatataagaacctactcagaaaaagccgctgcctctcctcggctccaccaggggtccatgtccccatacccagaggtcccactgtttggccttgtggctgctcctcctctcccctcccacctcttcctgccctgctccttcacatggatccatgggaactactgggtcctctctacacttctggggctcaggggactggaatgggataggggctgctccatcttcttccagacttcctatagtctcttcaagccctgcagtaggccaagaagatgggtaaactctttccctttccaggcagggcctactctagtcagtctcctgattacaaaagtctccggaaccaaggtggacaccggctgctatgttcaccaacacccctgagctgcagggagcactcaccagccatctcactgcgctcagcgagtggcctgctgcagtctgaaatacaagtttcccttctggagaaagtctcttgaaccctctatcacttggctttgcaggttgaaggataccatcctcccttttcctcacagaaaagagcaggggagccacctacaccaaggggcctctcatgactccccaactctctcggcattttccttatataaatcagggagggtgcttacagcatgaccagttctggggcttagagtgagagacagtgggtttgaagcagatttctgatctaacaggttgacattattatgtcatttaattcccaattcaaccataaaggaatattaagtataaaagtctcaatatcctcactttataattttaaaagacagattgttatccatctaacatttttaaggtttggataacgatcattctgttatctaatgcactttgttagggggtggagggagaaggctgttggattatgccattgtataaatactaaaatatagttatctgggtcaagattagatgagtcacataaggccatcccaagcagcaataaactacaatagatcaggactgggggtaaaggggacaccctgggattacagttcccctttctgtgcaagtcgagtctatctcctgggccaccagtcaccccagcccaaagcagatgtccagaagccaccgtccagttccaggccaggggcagttttgttaaatgcctatcacgctttagtttacccatctggcccatgacaacaagtctaccaatacttcagaatcataatattggaacatgactaaacagtctatattgagagcctttaaaacatggccataacaattaaagttcttttcattttattatcaagcaaaattttaaaagctaatattaaaagcttcatttactttatgtgggaaacaaacgctcacaatgaaatatattagttccctacagaatgaatcataagtaattacataggaatagctcatggaaatcgactgccacaatctattggatatatagagattgaaagcaaactttggaaaacagccctttaaacataactattccattttaaaaagattcaggtgttccttatttaggtatagcatatgcaactgatgacattaatgtagttttgttcacacttgccaataaatagcaatattccaaaaactagagctgaatttctaagactcattcaccataatcaatcatttgttgcttttccctcttccctcttttacttattacaagttgttaatttgcaaaaaaaaaaacacaaaacaaaacaaacaaacaaacaaaaaacaggcactaaccaccaaccaatatggatgcctcatggaaagggattatgttttatggtttattcaaaatgtagactctccactattttccagagaagaaacaaactgaggtaataatggctcaatattatgaacactcttaacttattaaagtctttaaaatgaaaatgctgtggtccaacagactgcattatctactgcttgaatcttagaacttacttctgcatagaaatcatgccacatatggctggataaccaggccagccccagggaaccccaaaggcaagtagcactactgaatatcaccaccagggggaacactttcatatgcaaatacacccaggcccctagcagaaaccgcttcccatatttacaaagaaagcaggttcctcctccctgtcagtgcttacgaaaatcccatcaccagaccagcgatggggactcggatgcaaacatggtgcaggggaaggcagagaagagacagggactgggccatacatgcaaaccactggccagctccccgtccgggtgggcatccccgcatgttatctttacactgctgctcctgcccagagtttctctcacaccctgcaagacagaaggcacttccacagcctttctccttccttcctggtgctaagggacaaaatgcccttgttagactttgcctccaccccatgcctcatttacaatctgtaataaaaggaagagacaaaggagcaaaagtgctcttctcccctgtgactcccatcactgccacactccggctcccattgttcactaagcccttatgcaccgggcaccttgccagacaggggacacgaagatgaggaagaggagaccctgccctcatggagcttcatcaaacaagagagacagatcaaatgaaaatgatctgtcagttgatatctgtcaatatgaaaaaagcaggcaggaactactctaacaggctagcacagcggctaagagcacaggctcgagtcttgctgctccacttactagttgtgtggcagggcaagacatttcacttctgtaagtctccataccttcatcaataatgggatagtaataattgtgcccaacagggttactgtaaggattaaagaaaataaaagctctcagtataatgcttgacacagagcaagcatttactaaattattgttatgaattattcaggtcattgttataaaagaggtagaaaaaacaactttcagagtggtgtcaaggactaagcaaactgaatgtttggtggtgtctatgggggctgtattttaaactcaatcttgaagaatgactaagagtctgtcagagaagggaaggaagggcattttagcaaaggcctgggctgggggcattcacatgataaggaaagatgccttcctggagtcagactccaaggccaactgggctggggcagctaagtccagagaaggacctcaggagtctgcccttaatcctgtacccaggacggggcgggtgagaggcacatgctcagatttgttcctgacatgtaacttcaagagcagtgctacatattttgcttatctatccagaagactgactgcatacagatgagatagggcgtggggggccaagtgggagggagctccaggaggtgcctccagacatggaccagggacaagaggacagcttaaagaaaggttgtgggaattgagtgcaacatttcgggtctcagcttagatgtcacttggctgggtagcctttcctatcttggcagttctgggtgacgtaccattttcctaagggatcttacagcaccaagacatcttgaatcagagctcttaacacctgtatctatagattagctgaacaaattcattaaggccgacagtgagccaggcccttgcttggcatggggaatatagcactgaaggcagggaagagtgtctgtcctcaagcactgctctagagctaacctgctggcaggggatacaggcaaacaaacaaacaaacaaatatagaaattcacatggtgctaagtgctataaagaacaaaacaaagttagagggtaaagagacagatcatagtggaaggggggtaccataggacaatcagggacagcctctgaagagggtcatatctgaccagacagcaggctgcaatgagggagcaaggcaggtggagacctgggaaaagagcaaggacagcatcccctagggtgaggcacatctgcagcctagccaggataccactgtggctggaacagagcaagcagggaggaggataaaagacataaggttgaaaccaggcaaggaccacactgtgtatggcctcgtacttttattagaagtaaaatggggccaggcctggtggctcacacctgtccagccctttgagaggccggggcaggaggattcctaaagtccagaagtttgagaccggtgtgggtaacataaggagatcctgcctctataaaaaacaccaaaaaattaaccaggtacacacctgtggtaccagctactcaggaggctgaggtgggaggatcacctgagcccagggaggttgagaggctgctgtgagccatgatcatgccactgtactcagcctgggtgacagagctgtctcaaaaacaaactaaaaaaattacttaaaaaaagaagtggaatgccaaaggagggttaagaagagtgaaaggatctgggcagggtgcggtggctcacacctgtaatcccagcactttgggaggctgaggcaggtggatcacgaggtcaggagatcaagaccatcctggccaacatggtgaaaccccatctctactaaaaatacaaaaaattagctgggcgtggtggcatgtgcctgtagtcccagctactcaagaggctgaggcaggagaatcacttgaacccgggaggcggaggttgcagtgagccaagatcgtgccactgcactccagcctgggtgacagagcgagactctgtctccaaaaaaaaaaaaaaaaaaaaaaaaaagaagagtgtcagtgtcaggatctgattcaggttaaactaagatcattctggctgacatatggaaaataagctacaggcagcgaaggcacagaaacaggaaagtcagaaggctacctcagtattctgatgagaagtagtggcagccagcactaagctgttaacacgagtggtaaaaatggtcaggtttcataccacatccaattcatcagcaagttctgccagctctaccttcagaatatacaggcagtagtatatattcaccacaactttcagagtggtattgaggactaagcacactaaatgcttgcggtaggatgcaggagtcaagagctcaaggagggccgggcacggtggctcacgcctgtaatcccagcactttgggaggccaaggcaggcagatcacctgaggttggaagttcaagaccagcctgaacaacatggagaaaccctgtctctactaaaaatacaaaattagtggggtgtggtggcgcatgcctgtaatcccagctactcgggaggctgaggcaggagaatcacttgaaccgggggctcagggggaggacaggtcaggagaagccccctagacgaaaggatttggagaaaaggcctcaggaccaaaccagcaaaggtgactgagaagaaacagcctagaaagaggaagccgagcagggggtggtgtcctggcagccgaagaagagcaggattccagaaggatggaaggagctgtcggaggatcagtactgcggagcggtcaagtgagagaactcatgaaatgatcactggacgaaagtcacctgaccacaacaagcagcatcagtaacgtggaggcttagggaaaatgggatggaaggaaggaaacatacaagcatacacaactctcttgaggaaacctgctattcaggaaagcagagatatggtgcagaggctggaggggagtatagatgaaggacaatattttatatgtgcaatatcaccgtgtgctttattgatctggcaaacagtaagaaacccatgtgggctaagaaaaatgcacaccaggaaggaggggcaaaaattcttcagatagctggaaaagctgaataatctttaatgactcaaaatgcttaccagaggattgatttaaacaaataaaggatattattccctttttacctttcaagaattacaatggttcttgtaactagttgaaataaatcttagaggcatacaatgtagttattacaagttggtccaaagctaaaataggaaaacagctataggatcaagaaaagatgtcaactgataaaatgtctttcttgatgatacagtatactcaagattacaatttctaaattcattatttttgataatttccatgagcaggacatacttacaggttacactggtttagtctgtaaaacttgtgtcgcgcaacacagagtctccaaatgtattttgctgtttccatgtcttcctagcaaacaaaataggcataaagcaatatgaaagcacacatacaacttgatacgtttaatgcagagtttgtctaaagacataatgggtgacatcatatgacaaagtcactttcagaacactataagcctttcattttccaacactgtgcccatggtatgaataccacaagtaggatttaatttatgaagacaaaacaatctgttctaacagtgtgattctcatattaaacagtttcaaaatgacttgggaatctaaaaactataaaaataccaacttttattcttgccaaatatactcaaagacatttttaaacaaaaatatgactcagtaactcaatattgcctttgtcaagagagcaaaagcaagtaactgttaaataacatttcttcagagctattcatttatcaatgaaatttaagatatcagtgcttactttctcccccacataatccctgaagtttaatttaaaggttatcatgatcagacagtagttatccaaagactcattcactcagcatttactgagcagccattttttgctaactgccattttgcaaaatgctatatgataaaactgcatgttttatacaattacaaaatattatcattttaatgctgccctgcctccaaacacatacaggcacgcagaagtagaacttgttaacttttaggaaaaacattccatgcagacccctaatgtttactcacagtttgaaattgaatggtctcctctttatttgccagctctaatgcaaaaaaggacttgttgtgggacatgttggcaatgtcatgccacctaaagaacagcaaatagagaactggcaatgtgagtgcccatgggggaaacaaggagatagaatacacaagttttccctaagcctgacgtgtaagttagcatttggtaacatttttgagaaaaacaaaaaacaaaaaacacgagaccagcctggccaacatggtgaaaccctgtctctattaaaaatacaaaaactagcccaggcgcagtggctcacgcctgtaatctcagcactttgggaggccaaggtgggtggatcacgaggtcaggagatggagaccatcctggctaacatggtgaaaccccgtctctactaaaaatacaaaaaaaaagaaaaaactcgccaggcgtggtagcaggtacctgtaggcccagctactcgggaggctgaggcgggagaatggtgtgaacccgggaggcagagcttgcagtgagccgagatcgcaccactgcactccaacctgggcgacagagtgagacactgcctcaaacaaacaaacaaagaaacaaataaaaaacaaaaactaggtcaggcatggtggctcacgcctgcaatccgagcactttgggaggccgaggcaggtggatcacctgaggtcacgagtttcagactcctggccaacatggtgaaaccctgtctctactaagaatacaaaaaaaattagctgggcatggtggtgggcacctgcaatcccagctacttgggaggctgaggcaggagaatcgcttgaacccaggaggcggaggttgcagtgagctgagacagcaccattgcactccagcgtgggcaacaaaaatgaaactctgtctaaaaaaaaaaaaaaaattacaaaaactaggccaggcgaggtggcaggcacctgtaatcccagctacttgggaggctgaggcagaagaattgtctgaacctgggaggcagaagttgcagtgaaccaagattgtgccactgcatgccagtctgggcaacagaacgagactctgtctcaaaaaaaaccaaaacagaaaaaagaaaaaaaaaaacagtggttttaatcagctagcatgaatgttctaattgaagtaacagcagctagttcaaaaagtaaactcatgtataataaatgagggaaaagagaatttaaaagatgtaaaatgtatcattctcatgtgtcagatttgcttgatggaagatccctctcttagctgattgccaatgccccatttattcattcaacaaaataaaagacacctattataacaatgccagaaattgcagtaggtcctagggacactaagattagtgagttacagtgcttccctcaaattcgcacagttggaggggaaaggtgggagaaagaacacagaagcaaacaagaacttttaagtgctgcaggtattaaaataaggcacaaaagtgggggaggtgtgctctgaaaagcttcagggtgaagataaatttgaaatgccaggaactcaaagagtgaactattctggaagtgatcactaggattcaaaatcttatactttctaattttatcgtattagcttttatatgttaatatttgattttattaatcacagaattttataaaaagaaaaaattatggaagaaaaaattttatccttctccattagatttatttattttaaatgtattaaaataaaatcaacttagtacggattccgttgtttgttaaatctaaagattattagcatcacattaaggcaactgtgaaaattcctatccagtgataaaggaagccaggtagaagcctcaagtttccatgtgacactttgggcaccatcagagccctgctcttcaggtgaagccacggatccattttcctctcctctccctgacccccaactcagcatgttgggaagggttaatataagtggcttggggacgagagagcaactgccaaaggggagccacccagcccagggcagtgcattctaggaatggggttctgctccccaagtgatgcgtactctctgaggtcataatcaccatggagaattcatggctcaagaggcagtaaagcaaaggaagtgagggaggagatgtcagtttagagaaaaagctcttcaaaggccaaactagttctcaagaagaaatggtaggagtggtttagaaagcttgagtagtgtgtgtgttgtggggcgggcagtgagtaggcggtggagagaataaaagctgtttaatacagcgattaagagcccacgcataaagtggaggatccaagttctagtcctagttatgccagttaataactgggtcaccatggacaaatcacaacttttctaagcctcaattatcacacgtgcaaagtggtggtaatacctactgctgacagtgttatgaagattacactaaaaaaaattcacaaaaaatgctcagcatagtttatctgactcatgataagcactcaacaaatggtagacacaaaggaaccaaaaaacagaagtgatagaatatgttttcctgccttataaaaacaatataagcttttggttggacatgaactttgggttttccagataacagattttaaggaattaaaggtaggggattgtacaatatggtccaacttactatctttaagatacaaattagaacacagaatactataaaggaaattaaaatcacctgtactttcattgttcagagtcagttactattagcacatcgctatatattctttccaacttgcttcacattccaagatttccacaaatgaatagtatctttttttatatcagcaaaaaaaaccaacattataaaaaataattgaaatttgcttagatactggtattttaggaattttggtacaaaactagagtcaaaacaaagctctatatttttcataggaaagagcccttcaggctgggcacagtgggctcacacctggaatcccagcactgtgggaggcaggcagatagcttgagcccaagagtttgagactagcctgggcaacatggtgaaactgtctccacaaaaaatacaaaaattagccaggcatggtggcattagcctgtagtcctagccactcaggaagctgggatgggaggatcacttcagcctgggaggtcaaggctgcagtgagtggtgactgtaccactgcactctagcctgggcaacagagtgagaccttgcctcacaataaataaattaaccaataaatagccttggaaaccagagctcaaattaaacattcatatcaaagcaaagaatggcctccatatggcacaaaaagggtcacacatttttaagcattttataataggccgtcattataggcattatactctggacatagagttttgaagaaagcggcttattgaaaaggactgttgcattcagatggtatttttttcctaggaagggaattatttccattttttaatgagaccttggtatagacttgtgaacaatttaactgctgtaagtactaaaaaatgtatcaccaacaggagccatagaaaacatacaaaaagaggtaagaaaaatacctaaataccacaggatgccttccattcttgtgtttcacaaagataccttcaagacacgctccaatggatatgtcacttccttggctatcctacaaggagaaagcagaagaagaaacacccaggaagcagatgcagaggaactgctgctagagttccctggactggtttcccagatgtagaaagttccgaagacctacagagtaactattcaggaagacaaaagtctgaatgagatctatgatcttataggtaagtataaaaattgaaaaagtttggccctccttaggaactctatttcaagaccatttcaaagtatgaaccacaaaatgggaatgtgttttaccacaaaactttggtcaccaggacctcagcttttaagtttccagagttttgcacgtcctcagcctttgcacataaggacatccttggatttccccatgattttctcaaatttgtaagcctaactttaaagagccccagccgccaagccacacttaccttagcagggtagctctcttctccatagccatccattctctctacctcctgcatgtacagcatttcagcatcaggagctgtgagccctctgcaacccaaaagaagcaagattgttcacaaagcaagcttaaaatggtttaaaataaagcttttcttaaaacctatatgtcaatttagcataagacattataaacatttcacgtttctaagcatctataattggctatatcaatcttgctatttactgaaaaccagtatgtgctgaatgctgagggtatcacatgagatcctgctctccatacttaaggcagatgagtgggaaggtgggggataaaacaactccctaaaaaatcttagggtgaaatcttgaacttttcttaaaccaccaagtaattgcttattatcccaaatatcagggctgggcatggtgactcatgcctgtaaccgcagcaccttgggaagccaaggacaaaggaccacctgaggccagcagtttgagaccagcctgggcaacatagtgagaccctgtcactacaaaaaaaaaaatgttttaaattagccaggcatggtggtgcacatctatagtcccagcagcttggaaggctgaggtgggaagactgcttgagcccaggagttcaaggatgcagtgagctatgatcgctccactgcatgccagtctgggcaacaaaaaaacaaaaaaaaacaaaaataaaaacaacaaaatatgaggcattactgagaattatgtgctaaatgtcgaacgcagggaataagggtacgaggaggctacatgaaaacccctttttgctcaggtgagtgcaacactactaggatgggtaggaaggcagtgtgggtaaaggaggagtgcccaagtgcatgcagacttgcatctccagcctcatcttccgatgctccccgctgtcctcaaggcacccacactgcagccatcccaaactctgcatctcttcagatagaatatgttccctagcccctctgggcttttgcacatgagaatccctcttcttggtgtgcctgtgactcacctgtggacctggccaatccctaatatccttcaagactctgtctatgcatcatttcctctggatcaccttctgggattctccaatgccgcagctccatgcagtcccaacacattccgcccatacccctctaactgcactcattatcttcttatatgtattataattactatagtgggttgtcctgccagccctcatattgcagggctgggaatgcactcttagaagacaagaaattattctatttatctttgtgtcatagcatccagcactcttcctctgcttaatgcagaataagaacactaagctatcttttaaggaaatgcacaaatgaataaatggaagtgacaaaaggcaggacaatgtgtgcctgagggaccaattaagctagaaaagaaatggttcatgtggttctgctgtccagcagaaggtaaagctgggaaggcaggatttaaccaacttgtaggaggcctttaatcccagggtaatgaacttgggctagtagaaagcatgaaaatacccatgagcacgtggaaggagaaggagagaggtaagaggaaactgatattctagggagattaatcttttgtgagtcactgtgtggatttgagtggagagagactagaggcaaaagtttattttatttggaaggggataagcaataggttctaatgaaactgatctgctttcaatttccacctctaccacacgtagaggtaactaaatctttttcttttttttttttttgctctgtcaccaggctggagtgcagtggcacgatctcagctcactgcaacctccacctcccaggttcaagcgaatcccctgcctcagccttctgagtagctgagactaccggtgcatgccaccacacctggctaattttttgtattttagtggagacagggtttcaacatgtttgccaggatggtctcgatctcctgacctcgtgatctgcccacctcagcctcccaagtgctgggattacaggtgtgagccactgctcccagccagagataacaaaatctttttgagcttggtttccccatctggtaagatggagataataatgtttatcttaatgagtagttataagaatttaatgatagagtacagacagtcctcaacttacgatgatggttcaactgaatgactttcaactttacagtggtacaaaggtgatacaaattcagtaggaactgtacttcgaggacccacgcaactattctgtttttcactttcagtacagtattcaacaaattatatgagatattcaacattataaaatatattacaggctttgtgttagatgattttgcccaaccgtatgctaacataagtgttctgagaacacgtagggtaggttagggtaagctatgatgttcagcaggactggtgtattaaatacatctcgacttaaagagtattttcaacttactatgggtttatcaggacttaaccccatcacaagtcaaggagcatctatatgtggaactgtgtggtagttggtttagaataagacttagcattatccagaagagtattttttcttacaggcaacacagagattcatcatgaaagaacgtcaatatgtacaagtatacaaaggtatgcagaagcatagttcagagtaataagcaccatagctcttagcatagctccccaggtgacagacacagcttccataggtatagagagggaagtaaccctgtacttgctaagctgtatcataaaagaaaacaaatcatcctaattttacgttaacctatacaggtttgtttgaggttatcaaacaaacctttactacatgcagtaaaaaatgggcacccttcaatgactggctgctttcaacttcctcagtgtcctcactggtaaaacatggacaataaataagtaatatgggtaagtgcttacttagaacagcacatgacacacagtgagtgctatataaatgttggctacttgtaatagtagtggcagtaatgttccaaatttagttgggcaaataaatattaatcatgtaaattaaatatttaattgaatatttcaaattcaagcagacattggttctatgctatttccatgtcttatttcttagagttacctgtatttctgatgtagtaaggccactttttgggttgcttcttccaatactttttcatcttgtaaccatccctgaagaaaacacacagtggtaagtatgtgacaattcaccccaatttcttagaaggaatcatggccattgactgttaatgactctcgtcactatcaggcaaaattatgactattgttactatatgggagctttgtttacataggtaatcatctttctaaggaattaactggcttctcacaagagccaaaaaaaaaaaacttgccccaccttctcaattccagggaaagtttcagctgagttatgtcaagttggtgacagtagttagccagtcctgagcccagcaagataaaaacatcttgtgcgttctctggcactgtgtagacactcagaacagcataccacaccttccttagttgttgcaatgcagtttccatgtcccttccatcagtaatgactttataaaagtagaaggcagtgtctttgtcatctactttttaaattgctgatgagaagcgacattcctcaatataattttgtaaggtttcaaaccttcagttaaaagcaaaacctgtgcatgcttcctgagaagctgaaaatgaatccttctttttaaactcacaaatagaaaacaaatgtctccaggcacagtgcagtgactacagacccttcagtttctgtgggttcacaaggaccaagatgactacaacagggaaagcagtcacacttgagatgtttataagagggaatttttttttataatcctattcctgacagtaagtctatcatacggatttcatttcagggattattaagggtataggaataaactgtttcttttaaaaggcccagtgtcaaaagaagtcttaccacaggaaacaaggcaaatttctgaagaaagtcctgggattcatactgatcaaagtcaccaaaatccgctatatagaatgacaaacattcacgttaattatatttaaatttcattgcaaaatatgcacaacaaaattcaatacgcagtatatctagatggtatgctaatatttcagaagtcaaatttgttatagctatataaagtatatttttaaagtatctttttaaaagtgttaattaggcagatatgagtcttggcttggaaaaatgcctatgaattaaataaaaaaacaagttgcaagctctatgtaatatgatctcattttacagttaaaatgcaaacaaaacctaccctgtaatcatatatgcttgcttatgtacaggaaaatgtcaaggagaaaccaaattgtcaacagtactgatgacctctggggaatagacttagaccacttgaatatattacagcaagatatatttgtgttgaaatttttaatattttttaaaaaattgacaattcagcaaaatgcttatgaaaaagtaattcttaaagccaaaagtgatacttaagaaaatctaaagtaccttgaaaaggaatgtggctccatgtgcatcaggcatttgtttaaaaatgatacatgtctccatgccttcttatagctgaaggagttttattaataattattctgattaaatttcactcccaaggctaaatgccagttattgtttgaaataatgccccatcagaaatcttcccagccaggcacagtggctcacacctataatcccagcacttcagtaagccaaggagggaggatagcttgagccaaagagtctgagaccagcctagcaacatagcaagaccctatctctataaaaaattttaaaaatcagccaggcatggtagcgcacacctgtagtcacagctacttgggaggctcaggtgggaggatcacttgagcacagtaggttgtggctgcagtgcgccacgatcacatcactgcactcaagcctgggcaacagagtaagactgtctccaaaaaaaggaaaatacacacatacatgtaaatacatgtatatcagacatgtaaaaatgaaaaaaataaacaattcaaaaatgctggtgaaatgcagaatctttatttatatatgtacattttaaagatgaggtcttgctatgttgcccaggctggtctcgaactcctggactcaagcaatcctcccacattggcctcccaaagtgctgggattagaggcgtgagacaccgcacccagccatctttatctattatgattgatgttattactgcataattcaggacaaccatttaagaaaccaaacaagtgggagtggggtgagggataaaagtctatacatggggtacagggtacactgctcaggtgatgggtacagccaaatctcagaaatcaccactaaagaacttattcatgtaaccatagccagccacggtggctcacatctataatcccggcactttggaaggctgaggcaggtggatcacctgaggtcaggagtttgagaccagcctggccaacatggtgaaaccccatctttactaaaaatacaaaaattagttgggtctgtgtggtggcaggtatctgtaatcccaggtactcgggaggctgaggcaggagaatcgcttgaacccaggaggcggaggaggttgcagtgagccgagatcgtgccactgcactccagcctggtccatagagcgagactccatctcaaaaaaaaaagtaactaaataaataagaagaacttattcatgtaagcaaacaccacctgttccccaaaaacctattgaaataaataaaaagaaaccaaacatatgaagtgtacttaaactgtaagcgaatataacctcatcaaactcactgactggcatatctttcttcttaaaatatgacctattagcagacaaagtctttgaactagatgaatacatagcatagtattaataaatgtatatgtatatagtcatgtgtcaaggatgggaatgtgttgagaaaggcatcatcagattttgtcactgtgcaaacatcagagtatacttacacaaacctaggtggtgcagcctactccacacctaggctatattgtatagcctactacacacctaggctatattgtataacctattgctcatagaagcctatacagcatgttactgtactgaatactgtaggcaactgtaacacaatggtatttgtgtatctaaacacagaaaaggtacgctaaaaatagtgttataattttatgggaccactgtcctatatgaggtcttttgttgaacaaaatgtcattcggcatatgattgtacatatgtgtgtgtatacacacatatatacatacttctatttattgtactgtttgctctgttgacctataacatgattaacttccagaagtctcatatttcattgaggtattccaagttcattttttcccaaaaggaagccccttagataacagaatatttcactaatatataaacactactaaagatgtatatagatagataacttaaaaatcccttgctattttgttgtaacacattttaatctgatagaaccatttcattatgaattgatcttatttaccttgaacagctaagcctgctagctgaattgcttgttctaaggtacaaggaatacttccttccaagatatctttcttcagttgcagataatactgatacctataaaaaatgtcagttgtataaggtcaatgtcaatattatctcattgagatacaatgcatttaaccataatttggtagagaagcataaaccagtgaaataaaaccttaatcccacatggttgtgtgtgtttttttttttttttttagatagggtctccctttgttgcccaggctcgagtgcagtggcatgattactgctcactgtagcgtcaaccttcctaagcttaggtgatcctcccacctcagcctcctgagtagctgggactacaggtgcataccactatgcctgacaaatttttctattttttacagagatgggagtttcaccatgttgcccaggctgttctctaactcctgggctcaggcaatcctagtgcttggattcaaaatgttgggactacggacatgaaccaccacacagagcccctagacagtttcaaacaaggatgagaaagtcctcaaccacatgacacttacacatattaaagtatatgtgatgaattacttatcccagattatagttatttcaaaattaaaacgatcctataagacaattagtcatctgcttcatgccctgtaaaacagtccccacaatttctttttagttggagaaatggaaagccagtggctaatctttactttaaaaactctgactagtaacttagtaatataagagtttgcttaccttgtttggtagaagttccctagcactggaaagtaaagccagagaaaaatggtttctgatatttcagaccaggctgatattaaaatgtttctgatgaaatccctcaaaacagctgttaagatgctttcttaatatctggtaatgtgggtttacttctgtttaccaccctgtttgtactttcaatatatagggcatcagttaccagaacaaggtttagagtcaagtagacctgaactctccaaattagtattctgcacgaacttgggcaagtcataatctggtgaatttaaattctatcaccagtaaaatgagggtaccatcaccccttcacaggactgaacatactcaaataataatatatgtgaaggaccaagagcatagccggctaacagcagctcttatcaatcacgtacttgaagccactcacttctccattttgataaagctctagagtgaagatttactacttccttttatttattttctcaacaggtaattactggggtctattatatgttaagcattattctagatgctggggataccgtactaaatggaaatcacagacactctgccagtgcagtctatggagccatctggaatccaaactgtcctccgtatctggtgcctgtgaagtgcaacccagttacagttcatgtttgaattcctctgacagcccacccctttaatcatttcatatgagtctttatcatcttatttcagccacagacatgtaaacctctgttctttattaccaaagaacctgaccaaaacaccatccattcaagtaagaagaatttggatccagcttttctccttccacctgctaacagccaaacccatggatttccctctatagctaatgggatgctggcagttctgggatccaccaaagagaaaaacttgagattttctatatggcagctcctttcagaagcttatctgagggagagcgtgtttagggaagtctgtctattgaacatgctattcacatattccattctaaatattctaggacttttccttaaatcaaaaacactagaaagggctgggtgcagcggctcatgcctgtaatcccagcattttgggaagccaaggcgggcggatcacttgaggtcaggagttggagaccggactggccaacatggtgaaaccccatctctactaaaaatacaaaaattagccaggcgtggtggcacatgcctgtagtcccagctacttgggaggctgaggcaggagaatcgcttgaacccaggaagcagaggttgcagtgagctaagatggtgccattgcactccagcctgggcatcacagagagagtctgtctcaaaacaaaaaacaaaaaacatgaaaaagcaacatacttggacccaattaatgtagccttccacaaaaatatttttgccttacattatactgttatgagaattgactcttccatatttgctctaacttattcatttctggttcaatgtcttatataaaaaatcacacctcaaagtttctgtttaaatgctataccaggaaaatgtatcatgcttgcaaacaggtatgcttctttgtgttacataatgaatgatggaactcgtatttcttcttttgctttggctgccattaagctcacagctaaaatccaggcataatcgcactcattactatccctcttaattgctttctccactatttaataatagttacctttaagtgatgaagagctggagctcagagattaagcaacatgctcaaatgcacagagccagactgagctggagtttgaatccccaggtctcaatgacccaaaggtcttgttcttaaccacgacaaatctacagttatagatatttctagtatttttattcatttagtatgttacatgacagtccacaaaacacaatggtcgagagcaaggacccaggagccagcctgcttgagtcccagttccagtatatactagcagtgtgaccttgggcaaggtgttcaacccttctgtgtcttggtttcctcatctacaaaatagagataatagcacctacatcacaggatttgttatgagaattaaattaataaagtacttgggacagtgtctaacatacagtaaaaaacataagtggttgttattatatgttattgtattatccctcaaatactttaatggaagcaactaaggatggatgaatggatggatggatggatacacagacagatagatttttttttttttttgagacagggtcttgctctatagcccaggctggagtgcaatggcgtaatcagggctcactacagcctcaacctcctggactcaagtgatccttgagcctcagcctcctgagtagttgggaccacaggtgtacaccaccacagctggctaaattttttttaattttttgtagaaacagggtctctctatgttgcctgggctggtctcaaactcctgagctcaagcgatcctcccacttcggccatccaaagtgctgggattacaagcatgagctaccacacccagccataaatacgtttttcttaaagaagtatttactgtaggagcagatggccaagaaattacacttcaatgacattatcactttctactaaagtgattaaaaaaacctttttgctaaaatttctatatattggtggggctgaagatggcttataaatatgttatttcaatatttttgcaggcctgctgcggtggctcatgcctgtaatcccagcactttgggaggctgaggcaggtggatcacgaggtcagaaggtcgagaccatcctagccaacatggggaaaccccatctccactaaaaaatacaaaaattagccgggcatggtcgtgggcacctgtaatcccagctactttggaggctgaggcagaattgcttgaacccaggagtcggatgttgcagtgagccaagatagcgccactgcactccagcctggcaaccaagcaacaagaagaatgaaataacaggaaaaaaacaaagcagtaataaaatgtaacatgcagacctgaattcaaaactgtcagccaaggaataaaagaaattgcacgttttgattcaaaagcaagtattccataaacttgcccgaaagtcaaaatatgctgattaaatattttatctaaatctttatgaagttactgatcaactttccaatataaaatatttcatacaatatatgacaataattatataataaattaggtgaccccattttgcacaacagaaattccaaataatgtatgaagaggcagccttttttcttcatctgtttttcttagactagtaatagaaggcaatgtgtaggcatcggcatttttattttttaagttttattttggaaattctgaaacatatgtagagacattaagtatagtcaccccatctccttatcatggtgcctcacccatcaaccttatgcctaccacgttttctgcatccatcctgtcctttgccccctccaccgccagtgttttacagcaaatcccagacatcgtgccacctgtaagtacttcagtacatatccctaaaaggtaagctttattttttaaaaatgtaactacatttttatcacacccaacaaaatgaacatcttcataatacccaatacctgattcatatgcaattttcatgattgcctcaaaaatgcatttttacaattttcttaaattagaatccaaacaaggtctacagattacatttaatggatgtttctaaatatctcttgctataaaaaagaaagtttttattaccttttattttcatgttattaacagaaatggagccatttgtcatgtagaatttcctgccttctggacttttctgattgtagtctcatggggtcatttggcaagtttacatgttctcacatctttcctgaaaactaatcattagatttagagcagcactgtctaacagaacattccgcagtgatagaaattatctatatctgcactgcccaatatagtagccattagccacatgtggctattcagtacctgaactgtagctagtgcaagaaaatttttaattgtattaattttaattaactttagccacatgtagctaacaactaccttactgaacagtgcagactggaagcttgctttgatacaagttcattttagtcattttcatcagtggtgcctggtacttcctgatgcatcacatcagaagaaatggtatttggttgtcccacttacagtgacgctgacattgcccactgagttcagatgatgccagcctgttccctttacccaaaggttttagccaatactgatgattgttacctctttatatagtctataaagaaaagataggataaacttactgccattcagagtaatgaattgtactctagtaagtttcaaaggtgagcaatgaggttttttttaaagtattatgaattcatgaattttaagatatatttggtatgttttaatccatgcagttgtattcttttttttgttttgttttgtttgagatgggctctcaccgtcgcccaggctggagtgcagtagcgtgacctcagctcactgcaacctccgcctcccaggttcaagggattctcctgcctcagtctcctgagcagctgggattacaggcgtgcgccaccacactcggctcatttttgtatttttagtagagacggggtttcaccatgttggctaggctggtttcaaactcctgacctcaagtgatccacccaccttggcctcccaaagtgctgggattataggcgtgagccactgtgcccagcccagttgtattctttatgatggtcaaaatttccaagctttgtgcagtggtagtatcatagccagtgaggtttatctgaggcatgattatcgacaattgaaacaaaatgtcctcttttgcaagtaaaaactccaggcaccaaagtgtttgctcgctctgccatgtgaggacccagccagaagttctgcaagccaggaagggaaccctcatgagacctcaaccatgctcagatctccaaactgagaaaatacatcagctacccagtctataatattttgttacggcagcccatgctaagatatatttgcaggtcgtttttgctagatatataatcattgcctcatatttcctttccttgaggatgttaaatgttacttttttgtctgttggcatgaagtgtttttccagaagtctgataccaatcttattttcttaattttataacagttttagtctggatgcccaatttctggtgactttgcagaatgtgttggcgctgattgctctggactgaccataccaggtacacagtatgccttttcaatagagagcttcaagtcattttcctttcaaggaagtttttagaatgtgttatagctagaatatacaatttgttatatagtttttggaatttgttctttgccaatgttttgccttagatcatactgttagaagaatgttttggctttttcctttagggaatcctattacatctattttttatcttgtcttctatacttttatagtttctatcatttcaaaatttctaattgtttttgcagctattttcatattcacctgttacacagacgaattattcccaagcttttctaattcagatttaaatggttctttcatatcatgttattttcttaattttttaagttcattttgtagtatcaggtggcagttttctgctgctttatggtcatatttttctgttaagtctgcactttctgaagatgtattattcagattgttgttctccccctttgttttcttttttcttttttttttttgagacagagtttcactcttgttgcccaggctggagtgcagcggtgccatctcggctcgctgcaacctccgcctcccgagttcaagcaattgtcctgcctcagcctcccgagtagttgggattacaggcatgtgccaccacacctgacatattttgtatttttagtagagacggcgtttctccatgttgatcaggctgatctcgaactcccgaccttaggtgatctggccccctcagcctcccaaagtgctgggattacaggtgtgagccaccacgcctggccctccccctttgttttcttccaatatctttgagtgggtttttttagaacacaatttttgaggtataattggcatacgaataagctgttcaaatttcaagtgtacaatttagacacatatatatatccatgaaaccatcactataaaatgaggaacatactgaccaactgcaaaagtttccttgcacccctcataatctttctctccaattcctaccccattcctaggaaaccactcatctgctttctgactatggatgtaatagacagaactctggatatcttggaccaagaggtaacctagtgcatgggaaggatgcgctgaggatgctggagcactaagagaaagtgcgagcatccttgaagactctgtggagctgtcagacaagctctgcaaggctgacttctgaactctcacagaagtcaatgatatttagggtttttgttatatatagctatacttaatccttaccgatacaacttctctatcaggtgctcctatacctaatcgatgagcaatcctattgattgactctaataggcccattctctctcaatccagctaatgcctttctgttcagttctatattgtaaacctatgcctagattatggcacaggtattcctaaactggtgtcctgcctatagtcttgccatctctgatctaccttctatgatgggtgatctttgtgaaatgtaaatttaatgattccattaaatttgaaaatctcttcctcattgtaccatgactttattgctaatgtctatttttaaaacctccttaggtaatacctgaaacttcctgaagacatgtaatcattttgattattccccctgctttgcaaaaactattccctctagaacatttctaaagtcaatttaaaagtcagtctctctacctttcctgttcaagttccccttgccccacccctaggaatccacagctttaattaaagcatttattatcataggatactgtaactatttatatgaactgccaattccaccagactgtgagcagctcctccagggtgggattaaagcatattcacctcccactctattcaacacaattcttagagcatatcttcagtaaatgtttaaatgagttaaagtgatcagttcaggctttttccttctggcttccacttttctcttcaatatttctatctcagacttttacagtcagtttgtgtttatcctaccactggatcctactgctttgactttccattctctcctaatcattaactggcagactcaaacagcactccacaaacatgggacagtaccaggttcttactatctgcaaggcactgtgtaagatatcattaagtaaagctaaagaaaacatgggctaaaacctaggaaaaagatacacggacaatcctaataacagggtatgacaattaccatcttaacacaagtagaatcaaattctaggtggtaagccaaaactcattctatcctggggtcatagatgcttcatggaggaggtaccttctgaaccacaactcaggaggcaaacaggattccagtaaatacatgtgagagaaagatctaggacacaaagatgaaagggcgtgcagcatgtttcgggcccttgaagtagcacagctacttcatttttgaacatatttaacgttcaaaagtaacattaaatagggttaaaaaggtcaggtagtgatgggattcacagaactttgaaaggcaggctcaagaactcaaattttattccttttttcattgtcttcagggggaaaaagaataagaacacttagttcctctattctgctccttaatatcatcttccctttctgcttttgtccctattaagtgcacttattggccaaaatttcctgatcttaaacacttccctccctctcctctgtactccctccccaaccggtctacagaatatagctagaggcagagaattctaggagcctttcagcacatttccttgaggaatgaagacagattttgtaactaattttctaaaatctcttctctcctttccttgttacaaaagatcagaaacaaaacaacaaaaacattaaaggtaacatcactacaagaagagttcacagagagggtaaatccatcatttttccctttaattattcctttgtgcctagtgaacccataagttacccaacatgcagtaaaacactctgacatgccacatatgagaatctctttgtaacaccgtggctaaaaatgtggggcgagagggcaaagtttcaaacttatcttctgacttcaaccttagtttcactttttacatctcactagactatttcctaaaaacaaacggcatgtaatttctcacctggtaatctcctgctgcagctgagaaactgaaggcacataaaacaccactccaaaatagacggtaggttccaatgcatatttatccagctgcttcttcaaaggtttttccaaatctacccaccggcgctgattttgcttgttgtagtaccagaggctgaagtaagtgacctggaaagacagaaggtcattgaaggaggcaataacatacaaaaggatttcaatgacttcagtcgcactaatccctgacctgtgaccaaatgacagcagtctcttattgcctttcttctcagagaagaacaacagcaaaaactgaaggaaaaaaaggaggtaagacctatctgtaactagctactcatattcaggaaacagaggcaaaaactcaattgctcttgcatatcatttactgaactctgaaccaaaaaaatacattcacgacctagacactggaatgtagtggcggctactcaattttatatgcagattttaacaacaacaaaaatacagaagaatttatccttggtttttcaattactaaaacactaaatttatcatatatatgtatatatacacatacacacacatatgtatatatacatatgtgtgcgtatgtgtatatatgtgtgtatgtgtatatatactatatatacacgtgtgtatatactagtgtatatacactatatataatggtatatatatatgtgtacatgtgtatttatgtgtgtatgtgtatatatagtgtatatacactatatatatggtatatatatgtgtatatgtgtatatatactatatatacgtgtatgtgtatatatacacctgtatatatatatgataaatttagtgttttagtaattgaaaaaccaaggataaattcttctgtatttttgttgttgttaaaatctgcatataaaattgagtagcccccactacattccagtgtctaggtcgtgaatgtatttttttggttcagagttcagtaaatgatatgcaagagcaattgagtttttgcctctgtttcctgaatatgagtagctagttacagataggtcttacctcctttttttccttcagtttttgctgttgttcttctgggcaacagagtgagcctgggcaacagagtgagaatctacctcaaaaaaaaaaaaaaaaaaaaaaaaaaaaaatatatatatatatatatacacacacacatacgcacacacacacacatatatgtgtatatatacgtatatatacacatatatgtgtataagtgtatatatacatacacgtgtgtgtgtatgtgtgtgtgtgtatatatatatatatatatatatatatattttttttttttttttttttttttttttttttttgagatagattctcactctgttgcccaggctacagtgcagtggcgcaatctcagctcactgcaacctccgcttcccaggttcaagtcattctcctgcctcagcctccagagtagccaagattatagcatgcaccaccacacccagctaattttttgtatttttagtagggacagggttttaccatgttggtcaggctggtctcgaactcctgacctcagttgatccgcccacctcggcctcccaaagtgctaggattataggcatgagccaccgcacccagcctcataattaatatttttaaataatcataactggggttctacccagtagaatgctgagtaagcagtgttaaaccaacttttcactactcttagttttggtttctataaaagaaattatttcatgtaagtaccatttctagtattcagatgcaattccaactcttctttattcctttgtccccaaaatttcattacatgcacatttaaaacaattataatgctgtgaaggtgaattctctctctccctacacacacacacatacacacacacacacacacacagagtgcatgagaaaagctatgactaatgcagtaaaataacgttagtgtattactcagaagtttaaagaaaatgcccagatgtcttagcatttagatctcacttgctgtgaaatgaaactgttaagataaatcaatactagccctgggcctggtcaacctgaaaggatattaatgcacttatgagctgaaatgacagcctcaagccactgctaatacttgcctcaaaatcaatctacagattaagacaattggaaaatcactgctttgtagttgcacactccagaataacactgtcccaacagaacttagtgtgatgatggaaattatctacatctgcactgtccaataaagcagccactagccacatgtggctactgagtacttgaaatgtggtagtgccaccaaggagctgtatttttaatattatacaattttaattgacttaaatagctgcaagtatctagtggctactgtattggatagtatagatttaaagcaacaagaaaactgagaaataatagaacatttctttgacctgcaatcctcattcaagtaaaaaataaaactttaatttgcaagggaaaagattatgcaaacatgtgctcaatagtcattttattattttttaacaaggtaagaactatacctttaaaatgagttcatcaaataaattcaacaagagtgaagaatgtgcccattttcccctatatccacaaatccctagaatactgctggaattcaataaattttgttgaatgtaaagaaggaatattctcttgcttcttagttgccacccaagtcatcacacaagaatggaatattttgaacatttcctatgtgccaggttgtattccaagagctgtagagataccatagattaaatcaccatcactaatttatgaagtaggtatttttatctgtgtaaaacctcaaagccagtgtttcccccaggtattgtccctggactacctctaccagaagtacctagagggtttcttgggccctaaaaagctattaatctcctaggtatttcttgggtcctttaaagtttgataactttgcactacactacactgctcctccaaagttatgcaagagaaagttatataaaaccttatctttggctgggtgtggtggcacacacctggaatgccagcattttaggaagctgaagtgggaagatttcttgagcccaggagtttgagaccaatctgggcaacatggcgaaacactgtctgtgtaaaaaatacaaaaaattagccagatgtggtagcgtgtgcctgtagtctcatctacttggcaggctgatcacttgaacccaggaggtagacagaggctgcagtcagctaagactgcaccactgcactccagcctgggtaacaaagtgagactctgccttaaaaaaaaaaaaaatccttgacaagctgcatgcaaataaaatttttgaaaatccaagcacattgtaatatatctgaaaggccaagtcccattgttaattatattctgaggttatgacattttaaaatgaattgcttattatctgtaagcatagaatatgtatcatacatttatagaaaacaagtactgttcttttctttttttaaactgcaacttatagaaaacaaaaatctggtttaatagaaagagcttgatgcttaagtccaaagttctgagtttgatttccaacagttatttactaggagtgaaatggtaaagtcaatcaatctaatttggttttctcaagtgtaaaataaagtaatatctccctcacaatcctgtcatgaggattggatacgggaaaactacctaagtacattttcctattagaaaaccattatattttattttttgagagagagttgcactctatcactcaggcgggagtgtactgacatgatcacggctcactgcaacttcaaactcccaggctcaagtgatccttctgccccaacctcctaagtagctagacaacaggtgcatgccaccacaccaggctatatatatatattttttttggtcaagagagggtctcactatgttgcccaggctgatcttaaactggcttcaagtgatcttcccgtctcagcttcccaaagtgctgggattacaggagtgtgccactgtgccagcctgaaaaccactatatttttaaaaatatcatttagtttcacccattctctccaccaacaaaatcaattactgactcctcccctcaaaagacttttaaaattacctacatgtatttgattacaacaaaatacatttctgttactatgtttgttttctgttccatcttagaacacaagttttggactgaatgtaccacattcggtctataatgccagattaggaatcctttaggatctaaaactgttttggtaagttaacagcaggtcatttttttttttgagacggagtttcactcttgttgcccaggctagagtgcaatggtgtgatctcagctcactgcaacctctgccttccagtttcaagcgcttctcctgcctcagcctcccaagtagctaggattacaggcacccgccaccacgcccaactttttttttttttttttgcattttttagtagaaacggggtttcaccatgttggccaggctggtcttgaactcctgacttcatgatctgcccgcctcggcctcccaaagtgctgagattacaggcgtgagccaccacgcctggctgtatgtcatcatttttaaccaaaatgaaaaggtcttaaaaataccctttgaatacattaacttcccctttaaatacagttggactgtagactgttccaaatacaaaaacagaattataaaatttctggtttattgtataatttgtggttgtaccttttgtgaatggactgtaatataatttaaaaaaataacagctgaacaatctgctagcattctgttaaaaagcacattctgaaaggaaaactgttaaaatatgctaactttatcagtgcatctattactcatgcaacatgaattagaaaatcaaatagaactgaacaaatacatttgttgaaattgcatcataattagtttttcacaaattatagaccatagaagagagtagcgagaactttatctaaaggtacaaacagctgaaaagaatggtgggcttaggccgggcgtggtggattgtgcctgtaatcccagcactttgggaggctgaggccagtggatcacttgaggtcaggagttcgagactggcctggccaacatggtgaaactccatctctactaaaaatacaaaaaattagccgggtatgatggtgggtgcctgtaatcccagctactcaggaggctgagacaagagaattgcttgaacccaggaggtggaagtgagctgagagcatgccactgtaccactgcactccagcctgggcgacagagcaagactgtctcaaaaaaaaaaaaaaaagaaaaaaagaaaggtgggcttagtaaattctttgttggttagctcttttaaataaaggagtctaagatttgggacatctgaatattgactttgtagcttgtcaaggatagattgtttacatgactttctcgtgcgtaactattgtagttaaagtatttgctttgggacctgccccaatgttcaagttctatcttaagaagtagtgaaagctagccaaaaatcaaatttatatcttgttaaatacctccaaggaggtattatatttctaaaattgctgctagaaatgtttatatacatatgggtaactaaattattgtaacattataatcctggattgaatgctctcttagaatttctacacatacataatcaagtcacaacatctgattccatgagattttatgactacaatatcatctgtttctaaaataggtaggtggagcttgagcaacaaagtattgtgattaaattctcatcaggcaaagatttttcctgggtaagaccatttttttttttggctcgtcttgaataataaccttaagaatctgaataattaactttccaaaataatttaaaatccattcaaaaaacaaacaaggtggggagtgagcacgaaaatcaaggaaaaggagagaatactttctaactcaatctataggccagcattaccccaataccaaagccagacaaaagataaccacaagaaaactatagaccgacatcccttgtaaatatagatgcaaaaatcctaagcaaatattaaaaaactgagtctaacagcacactaaaaggattatacaccatgactaagtaggattcatcccaggactgcaagggtggtaaaacataccccccaaaatcattataccatattactaagacaaaagaaaaaaaacacacatgatcatctcaattgatgcaggaaaagcatttgacaaaatccaacatccttaatgataaaaaacacctagaaaactaggaatagaagaatagagaagagcttcttaacatgacaatgagcatttaggaaaaacccacagctaatatcatactccatggagaaagactgaaagctttccccctaagatcagtaacaagacaaggatgcccatgttcaccactgccatttgacattgtactgaaggttctaaccagagcaattaggcaagaaaaataaaagacatttaaagtggaaagaagtagtaaaactatctatgtacagatgacataatcctagacaaagaaaatcctccaaatccaccccccaaccgtgacacacacacacacacacacacacacacacacacacacacccctgccctactcgaggtaatacattcagtgaagtttgcagggtacaagatcaacatgcaaaaatcagctgctatataccagcaatgtacatgtcaaaaaaagaaaacaattccatttacagtaatatccaaaagaacaaaatatgtaggaataaatttgaccaagaaggtgaaaaggcatatactgaacacaactaaacagtgctaaaagaaattaaggaaaatctaaataaatagaaagatatcccatgttcatagactgaaatacttaatattgttaaggtgcagtactacccaaagtaatcttcaaattcaaatgcaatacctatcacaatcccaatatgctttttcatagagataaaaagccaatcctcaaattcacatgggcctgcaaggggctccaaatagccaaaacaatactgaaaaagaataacaaaattggaggactcacacttccttgtttcaaaacttattacaagagtatagtaatccaaactgtgtggtactggcataaggagagacatatagacaaatagaatagagagtctagaaatgaacctatgcatctacagtcaactgattttaaataagggtgccaagaccagttagtggggaaaagaatactctcttcagcaaatggtgctggggcaactgaagatccacatacgaaagaatgaagttggatccctactccataccatatataaaaattaagtaaatataagaagcgacccgtaaaatagtttagaagaaaacattagggtaaatctctgtgatcttgaatttgggaataaatgcttgagtataacaccaaaaacatgagcaacaaagaaaaaaatagataaacttatttcaaaattacaaaacttgccaggcacagtggctgatgcctgtaatcctagcactttaggaggccaaagtgggagaaacttgaggccaagagttcaagaccagcctgggcaacaaagcaagaccctgtctttacaaaaaattttaaagttagctgggtgtggtggcacacacctgtagtcccagctactcaagaggctaaagtgggaggctcacttgggcccaggagaccaaggcttcagtaagctataattgtaccactgcattccagcctgggcgacagagcaagaccctcttaaaaacacacatacacacgcacaaaatttagaacttacatgcaaaaaaaaccatatcaggctaggcatggtcacttatagctgtaaacctaacattttgggaggctgaggcaggaggactgcttgagctcagaagtttgagacaatcgtggacaacatagtgaaactttgcctctacaaaaaataaaattagctgagtacagtggcacacacctgtagtcccagctattcaagtggctgaggtggaaggatcactttaaccccaacagatcaaggctgcagtgagccatgattgtgccactgcacttcaacctgggcaacagagcaagaccctgtctcaaaaaataataataataaatgaagaaagtaaaaaaaaaacctacagaacagaagaaaaggagaaaatatttgcaaattatatatctgataaaggtctactacttgaaacgtataaaatgactcttacatacagaaagaaacaacccaatattaaaatgggcaaaggacttacacactttttgaaaaaagatatgaatggctaacaagcacatgaaaagatgcttaacattgttagtcattagggaaatgcaactcagaaccataatgagataccacttcacaccaactaggatggctataatttaaaaaataggaagtaaacattggtgaggagaaactggaacccttatacattgctagtagaagcagaaaatggttcagctgctgtggaaaagtttggtggatcctcaaaacactaaatatagaatcaccatatgatccagcaattccacttctaggtacatacccaaaagaactgaaaaacaggtgctcaagaaacacatgtatatgcatatgcacagcaggactatctgcaataaccaaaaggtggaaacaagccaaatgtccatcaatagatgaatggataaacaagtttgtggtgtatacatacaatgaacattcagccataaaacacaatgatgtactggttcatgccacaatgtggatgacattcaaaaatattatgctaagcaaaagcagccagaagacaaaaggtcaaatattgtataattctgtttatatgaaacatctgaataaatcccaaggtgtggtggctcatacctgtaatcccaaggcactggaaggccaaggtgggagaattgcttgaggccaggagttcaagactagaatatataaatccacagagacagacagtaaattggtggttgctaggggcagggaagaatagagaatgactgcctatgggatacagaatttcctttgggggtgatgaaaatgttttagaaatagacagtattgtaatcgtactaaatgccaatgagttgtttactttaaagtggttagttgtggccaggcacggtggctcacatctataatcccagcactttgggaggctgaggcaggcagatcatgaggtcaggagttcaagaccagcctgaccaacatggtgaaaccccatttctactaaaaatacaaaaaacttagctaggcatggtggtgtgcacctgtaatctcagctactccggaggctgaggcaggagaatcgcttgaacctgggaggcagaggttgcagtgagccaggatcacaccactgcccttcagcctgggcaatagagcgagatgatctcaaaaaaaaaaaaaaaaaaaaaaaaaaaaggttagttgtacattatgtgaatttcatctcagtaaaaaaatgtttttaaagatcagaaatattcataataaagtaaataattttatttttattacaataatttttggggaacaggtggtgtttggttacatgaatacattctttagtggtgatttctaagattttggtgcacctatcatgtgagtagtgtacactgtacccaatctgtagtcttttatcattcaccccattcccatccttcccctggaaaccccaaagtccattacatcattctcatgcctttgcatccccatagcttagctcccacttacaaatgagaacataacgatgtttgattttccattcctgagttattcacttagaataatggtctccaactccatctaggttgctgcaaatgccattatttcattcctgagtagtattccatggtgtgtgcgtgtttgtgtgtgtcacattttcccttatccactagttggttgatggacatttaggctggttccatatttttgcaattgtgaattgtgctactataaacatgtgtgtgcaaatgtctttttcatacagtggcttcttttcctcctagtagatacccagtagtgggattgctggatcaaatggtagttctacttttagttctttaaggaagctccacattgttttccatagtggttgtactagtttacattcccactagcagtgtaaaagtgttcccttctcaccacatttacaccaacatctattattctttgatttttttattatggccattattgcaggagtaaggtggtatagcattgtggtttgatttgcattttcctcataattagtgatgttgaacagttttccatacgtttctgggccatttgtatatcttcttttgagaattgtctaactcatgtctttagcccatgttttgatgtgattatttgttcttttctcactgctttgtctgagttccttgtggattctggatattagtcctttgtcagatgcacagtttgcaagtattttctcccactctgtgggttgtctgtttactctactgattacttcttttgctgtgcagaagccttttagtttaattaaatctcatctatttttgtttttgctgcatttgtttttgggtttttggtcacagactctttgcctaggccaatgtctagaaggatttttctgatgttatcatttagaattttaatagtttcaggtcttaggtataagtctttgatcccacttgagttgatttttgtataaggtgagagatgaggatccagtttcattattatacatgtggcttgtcaattatcccagcaccatttgctgaatacggtgtcctttccccactttatgtttttgtttcctttgctaaagatcagttggctgtgggtatttggctttatttctgggttctctattctgttccattgacctatgtttttataccagtaccatgctgttttggtaactataggcttgtagtccagttggaagtcgggtaatgtgatgcctccagatttgttctttctacttagtcttgctttggctatgggggctcttttttggttccatgtaagttttaggattgttttttctagttctgtgaagaaagatgatggtattttgatgggaattgcattgaatttatatattgcttttggcaatatggtcattttcacaatactgattctacccatccctgagcatgggatgtgtttctatttgtttctgttatctatgatttctttcagcagtgttttgtagttttccttgcagagttctttcacctccttggctgggtatattcctaagtattttaattctttttccagctgttataaaagaagttgagttcttgatttcattctcaacttcatcactgtttgtgtatagcagtgctactgatttgtgtacctgaattttgtatcctaaaactttactgatatggtttggctgtgtcctcacccaaatctcatcttgaattcccacgttgtgggagggacctggtgggaggtaactgaatcatgggggcagctctttctggtgatagtgaataagtctcatgagatctgatggttttaaaaatgggagtttccctacacaaactctcttctcttgtctgccaccatgtgagacgtgcctttcatcctccaccatgattgtgaggccttcccaaccatgtggaactgtaagtccattaaatcttccttttgtaagttgcccagtctcagctatgactatcagcagcatgaaaacagactaaaacatttactgaattcatttatcgatctaggagctttttggatgagtcttaggggttttctaggtatacgttcatatcatcagtgaatagagacggtttgacttcctctttaccgatttggatgccctttctttctcttgtctgattgctctggataggacttgcagtactacgttgaagagaagtggtgaaagttaacatccttgtcttgttccagttttcagggggaatgctttcaactcttccccattcagtataatgttagctctgggtttgtcatagatggcttttattaccttaaggtatgtcccttctatgccaattttactgagggttttaatcataaaggaatgctggattttgttaaatgccttttctgcatctattgagatgatcatattgtttttaatgctgtttttgtggtctatcacatttattgacttgatattaaaccaaccctacatccctggtatgaaacctacttgatcatggtgtattatctttttgatatggtgttagattcaaatagctagtattttgttgagaatttttgcatctatgttcatcagggatactggtctgtagccttttttggaacaaagcctccaagaaattttagattatgttaaatgaccaaacataagaataattggtattcctgaggaagaagagaaatctaaaacttggggaaacttatttgagggaataatcaagaaaaacttccctggtcttgctagagatttagacatccaaacacaagaagctcaaagaacacccaggaaatacatcacaaaaagatcatcacctaggcacacagtcatcagattatctaaagtcaagacagaggaaagaatcttaaaggtcaggtgcagtggctcactcctgtaatcccagcactttaggaggccaaggtgggcagaccacttgaggcaaggagtttgagaccagtctggccaacatggtgaagccccatctctaccaaaaatataaaaatcagccgggcatggtggcaggaacctgtaatcccagctacttggaaggctgaggccagagaattgcttgaacccaggaggtggaggtagcagtgagccaaaatcacaccatgcacttcagtctgggcgacagagtcagacaccatctcaagaaaaaaaaaaaaagaaaaagaagaatcttaggagctgtgaggcaaaagcacaaggtaacctataaaggaaaacctatcagattaacagcagatttctcagcagaaactctacaagccagaaggcattggggtcctatattagcctccttaaacaaaacaattatcagccaagaattctgtatccagcaaaaccaagcttcataaatgaaggagagataaagtctttttcagacaaacaaatgctgaaacaatttgccactaccaagccagcactacaaaaaatgctgaaaggagctcttaatcttgaaacaaaacctcaaaatataccaaaatagaaactccttaaagcataaatctcacagggcctataaaacagtaacacaatgggggaaaaaaaaccaaattattcaggcaacaactagcacgatgaatagagcagtacctcacatttcagtactaaccttgaatgtaaatggtcctaaatgcttcccttaaaagatacagaatggcagaatggataaaaatccaccaaccaagtatctgctgtgttcaagaggttcatctaacacataagaactcacataaacttaaggtaaaggagtggaaaaagatattccatgtaaatggaaaccaaaagcaagcaggagtagttattcttatattgggcgaatcaggctttaaagcaacgacacttaaaaaagacaaagagggacattatggaataataaatggtctagtccaacaggaaaatattaccatcctagatatatatgcacctaacactggagttcccaaatttacaaaacaattactactagaccaaaaaaatgagatagatggcaacacagtaatagtgggggacttcaatactccactgacagcactagacaggtcatcaagacagaaagtcaacaaagaaacaatggacttaaactataccctagaacaaatggatttaacagatatttacagaacattctacccaacaactgcagaatatacattattttcatcaaaacatggaacattctccaagatagaccatatgataggccacaaaacaaggctcaacaaattttaaaaaaatcaaaattacatcaagtactctctcagacgacaatggaataaaactggaaattaactccaaaagtaaccctcaaaactatataaataaatggaaattaaataatatgctcctgaataattttgaatcaacaacaaaataaagacaaatttaaaaattctttgaactgaatgataatagtgacacaacctataaaacctctgggatatggctgggcacagtggctcacgcctgtaatcccaacattttgggaggctgaggctggcagatcacgagatcaggagttcaagaccagcctggccaacatagtgaaaccccatctctactaaaattacaaaaattagccaggcatggtggtgcatgcctgtagtcccagctactcgggaggttgaggcaggagaattgcttgaaccagggaggcaggggttgtggtaagccgagattgcgccactgcactccagcctggacaacagagtgagactccatctcaaaaaaacaaacaaacaaaaaacctctgtgatacagcaaaagcagctctaagagcattaaatatacattaaatatatattaactcatagcattaaatgcctgtatcaaaaagtctgaaagagcacacagacaatctatgctcacaactcaaggaactagagaaacaagaaccaaccaaacccaaacccagcagaaaaaaagaaataacaaagatcagagcagaaccaaatgaaattgaaacaaaacaaaacaaaaacaaaaagctggttctttgaaaaggtaaacaaaattgattgaccattagcgagattaaccaagaaaagagaatatctaaataagctcaattagaaatgaactgggagatattacaaccaataccacagaaatacaaaagatcattcaagtctactatgaacgcctttgcgtgcataaactagaaaacctaagggagatggataaaatcctggaaatagacaactctcctagattaaaccaggaagaaacagaaactctggacagaccaataacaagtattgaggctgaaacggtaattaaaaaaaaaaaaactgccaacaaaaaacaagtccaggaccagatggattcacagctgaattctatcacacattcaaagaagaattggtaccaatcctactgaaactattccaaaagatagagaaagagggaatcctccctaaatcattctatgaagccagcattaccctaataccaaaaccaggaaaggacataacaagtacagatattttcagctctattttaaaatgtttaaatacaacaaattcagttcattaagtctaagaaaaaaaatgagccagaaatagacgagcctatgagttcattacaatttctattttctaatatctatacttacgtcaagattttgtgccgtttgacagttaactggcaacctcacgtgaacataattgaagaacagagaatagggaaaaatgtgtttgagcaatcaaaaatacatattaaagtcaatgttataaagtatatgcccttgacaaagaagaaatttctcctatctcttttatggattttttttcttattttatacatacttttaatgagtttagcgatttggtaatccaatccaaagcagattaaaagatgacaaattaaaggaaaagggcttatttaataatagcaagttggcagtagagggaagtgatgggcaacattctttttagcaaaggagaacacgtacataacaaacaaaaaccccttaaatagaatttacaaagaattacaaatatatgggagtctggagttacttactaaagaaacaaataactccaaacattaattagtcatgtattcaacaacaatcactgttcctaaaagcagaggtagtatcctttatttacgacagatagaaatttataaattgtttccaaaacttagcactccaaatagtttggacaaaggagtcaaccttgtttatcaggcaaagttagttatgaagcgcttcatttcccaaagaaataacttatttccaagaaataacttattttccaaaaataacttattttatataaagctttacagtactctagccaatttaattggggtttcattacttcacttacaagtacaagcatattttccaaagccaaacatgaaagctgtttccatttctgttttggtacctgctgttatttgttttttgaaaggtttaactagtagcatagaagctaattacagtcacgtgccgcataacaatgttttagtcaacgacagaccacaaatgcgatggtggtcccctaagactgtaacagctgaaaaattcctatcacatagtgatgttgtagttgctaagttgcagtgcaatgcattactcacatgtctgtagtgatgctggtataaacaaacctatcgtgctaccaattgcacaaaagcacagcacatacaactatgtacagtacataacactggacgataataaatgactatgttactgatttatgcatttattatactttttatttagagtgtactcctatttataaaaaagttaactgtaggccaggtgcagtagctcccatctgtaatcccagtgctttgggagactgaggccagaggatcacttgagccaaggagttcaagaacagcctgggcaacatagtgagaccccatcacaacaaaaaatacaaaaatcagccaggtgtggtggtgtagacccaactaggaggctgaggcaggaggattgcttgagcccagaagttcgaggctgcagtgagctgtgattgagccactgcactacagcctgggtgacagaatgagaccctctttcaaataaaaaaaacagtgaactggaaatcagcctcaggaggtttccagaagaaggcattgttatcataggggatgacagagccatgcatgttaccgcccctgaaaactgtccaggaggacaagatgtggaggtgaaagaaagtgttattgatgatcctgaccctgtttaaggctaggctaatatgtgtgtcttagttttcaacacagaagtttaaaaagtggccgggcacggtggctcacacgtgtaatctcagcattttgggaggccaaggtgagtggatcacttgtggcgaggagagttcaagatcagcctggccaacgcggcaaaaacccacctctgctaaaaattaaaaaaaagggggggcggggggcgcttggtggtgcacacctgtaatcccagctacttgggaggctgaagcacaaaaatggcttgaacccaggacgcagaggttgcagtaagccaagatcacgcaactgtaccccagcctgggcaacaaagtaagactgtctcaaaagaaaaaaaaaaaagtttaaaaagtaaaaaacaaaaaaatactttaaaatagaaaaaagcttatagggtaaggatatagatatttttgtatagctgtacaatgtgtctgtgttttaacctatgttattacaagagtcaaaagttttaaaaatttaaaagtttgtaaagcaaaaacgttatagtaagctgaggttaatttattatcgaaggccaggtgtggtggctcatgcctgtaatcccagcactttaggaggccgaggtgggaggatcacctgaggtcaggagttcaagacaagcctggccaacatgttgaaaccccatttctactaaaactacaaaaattagccaggtgtggtggtgcacgcctataattccagctacttgggaggctgaggctacttgggagaatgcttgagcctggaagtcgaggctgcagtgagccatgattgcgtcactgcactccaacctgggcaacagagtgagactctgtcttaaaaaattaaaaaattgtgatatatttaatgtagcctagctgtacagtgtttctagaggctacaatagtgtcctactactatagtgcaacttcctaggccttcgtattcactgactcacccacagcaacttttagttctgcaagcgccattcacggtaagtaccctatacaggtgtacctttttaatcttttacctcacatttttactgcaccttttctatgcttagatatgtttaagtacacaaatactcaccattgttatatatatataattacctacagtattcagtatagtaacatgttggacaggtttattatagcctaccaggactaggccacagcacatagcaggtgtgcagtaggctataccacgtaggtttaagtactccctgtgatgttcacacaacaatgaaattgcctaacgaatttcttagaacatttccctgtccttaagtgacacatggctgtatttcccccgggtgacaatgcctgagattccaatagctgccactagcatggtgtggtacaaagagcactagatttgcaggcaaaaggctcggcctttgagtcctgactttaccacttgccagctctggaatgtctcacttcctcactgagtctgtttcttaatagggaatttaacatgtactcttccttcctcaaaattgtggtgaagaactttgtaagttctaatcgtactgataatactgaaaagcactcttacctttgtcatggtacctatatttagcagataggatctcttcaggtatgacagaaaatagaataaaacttgaatcaagcatgcttcttccttgaaaatatcactattcaaataacagtcaaactaatttcttcctttaaagtctgaacataccaggacttttactaaaagaaaggcaaaaactttgctacagacaggcccatgtgcctgaaattttaactactgccttggtctaggatatcttcccagaagcacacatcctctcttccttgagtccaaatcttctggactatgcacgtcctgttaatggagttcgtttaattgtaacagaagttttccagcagacagcctttagttattggcgttcagttcatgtctcctgccacactttgttatataactttccagtgcttttcctgataagaaactttacctccacgtggcttctctttctccacagctgcatccactctcactggtgatcaaagcaaattgacttgacctgtgggaaactcattccagcagaagttgttaaatcactgaatcttctagcatcccctagatcaattctcaatagtcactgtagagaattttgtgaaactttcattgtcaggtgtgtttacattctcccttcctttcctattttgttatgaacaaacatatcaggatagttttcaaaaagttattcaatgatttcttcatagttgtttaaaattttttcatagctactcttctaaaattgtacagataactgtgcctgctttgtaaactacagtaaaaataaaagttaaaacaaacttggcttcttttcagcacaatatggttgacttactttacatgaactgatgttgactgagaacaaagtgatttgataaccaagttttttgttcaaagcaaaagagagtttacaaatttgagatggggaaaaaatgtgcagcacccaaatcatagtcccctaaggagacgtcagctattaaaagcaggtccaaatcctgtcagaatgtaaaccctttcctaatccctaagtcatttctcgtctaattattttaagagtctttttggttgtactatttttaaagtagagcagagggacacagaaattagctgaagggtttttaaagccactgatgcattgggttgataaaagttaatcccatctaaaattgcaaatataatttcatcctgatgcctttcttagactaggcagaagtcagaagacttttcatcaggaaagagatgacagaagatagcactagataaagtctatcccgggaagagatcatctaacaagggtagttaacaagtattaacctaattcaagcctggagcttacctttacagagtctgccataaataatgaagtatcgtacttcttccttgtgacagatagtggcggtcacattgcctcaaagcaggcagcattttttccttttctgtttaattttaatcagttttcttctatacttgatcaaataatatatattttacagccaaagtggtaatatgcaatatcattatactctattacaactaaatgaagactcaagaaaataatcaagagtacatcttgaccttctaaattattctgaaattatactgaagtccaagtaactgaacttctcgtgtggctagatttttgttgttgctgtagcatttatctttaaggaagagtcaaatgataagacaatttcagggactgaaagacagtaggaggcacaaactgagattactgtccacatggatgaactgcttatctcttttctatttactatcctggacaatgagatgctatgaatatgatgcctctgaaacacaaataaatatactctatttttaactggactaatgtttagaaagattcatctattcattcaatgaatattgattgaatacctactacatgtcaatcactgttctgggaactaggaatacagcattgaacatgagaacaaaattcctgccctcacgtaacttaattccaatagggaaaaatagacaagcaaaatatatattatgccagatactgataagtgctatggagaaagatcttgaattataagattaagacaatatcaacatgtttttaaagagtaaactaggattaaaggggaaattttagtagtcacgtgtcccttaacgatgtgggaatgcatcattaggctatttcattgtgtgaacattatggagtgtacttacacaaacctaaatggtatagcctcctacacatttagggcatgtgatatagcctactgctgctaggctacaaacctgtacagcacattactgtagtgaatattgtaggcaactgaaacacaatggtatttgtgtatctacacttatgtaaacataggaaaggtacagtaaaaatacagtattataattttatgggaccaccatcttataagcagtctgtcattgaccaaaaatgtgatatgcagcacatgactgtatatatataaccaacaagaatgacagggataattgagatgttactgcacaaagtttcaatacagtcaaaagctaatatgctctatgtgctaccatataaaggttgtttagtttacgacccacataaccaaagataaactagaacttcttattcttcagtcacagcctgggctcatcacgaaaggcagccagcacttcaacggactcactgcctctacctttctccttgcttggatgaagaatctgaatctagaagcccaccaaattcatctaacagtagtgcaagcagatattgctttggaaaatatctcagcagagaacactcctgggatgtatttcatcagtctgatacttccaactctgccagggaacaagctcaccaaaggcttctcatcaaacagctctgccctaaacaccctggggattccccaacagtgtcttgcgggcctaatgacactcatgttccttctcatgcttacctttctttgcctgacgtgagtgcaaaaacctatcttaagcaagataattgtaaaaatacaaaaattaaatgataacaaatatctccagagtacttacaaaaactactgtcacatttaggaggccactctgagccaggctgtcatcaagggcatgagctccagagcaggccacctgtcatttgtcaaaggttataaaccaggaagaaagatgctgttcaaggagtcagaactactctagctgtggtttccgccatgtaaccatgagcaagtcacttaatacctttgtgtctcagttttcccatcagtaaaatggagatgagcataacagtgcctcatatacaggatttttgtgaagatcaaaataagcaaaaacatttaaagcacttacaaaagtgtctcatgcaaacaagtgctcaagtaatacgagatcttcttatcatggttttctagtccctttaaacagtataaaatttcgtattacatttatttagtagaggagatcctacacttaaatacttccttcactaataggattctatctttgggaacttttccttttctttccttttttttttttgagatggagtctcactctgttgcccaggctggagtgcaatggcacaatctcagctcactgcaacctccacctcctgggttcaagcaattctcctgcctcagcttcccgagtagctgagattacaggcgactgccaccacgcccggttaattttttttttttttttgagacatagttttgctcttgttgcccaggctggagtgcaatggcatgatcttgactcaatgtaacctccacctctcaggttcaagcgattctcctgcctcagcctcctgactagctgggattacaggcatgcaccaccatggccagcaatattgtatttttagtagagatggggtttctccatgttggtcaggctggtctccaattcccgacctcaggtgatccgcccaccttggcctcccgaactgccgggattacagacatgagccaccacgcctggccttctttccctttatttccttttaaagtaaatagacaatatcaacacttggattgcttttcttttaggaaaatggcaatggctccatggaaaagcagtatattgagagaaaagtgctaaaacaagagctggaagacctgaattctagcagggggctgtcaccaactagctgccctagccaggcattagttgtatagcatcatacagagaaatctgcattctattgaagggtagcatacattatacaaataataataatacaattttagacatattcactattaaacatgcttcatttttctgttatcatactgtatggtttaagtgttatttccttaagtcactaagcataaatttgacttcaaaataggtgtcaatcataaaaacacaggcgaatcaagtatgcaagtgtctacatattatttctaagtgcaaaatacaagggactgagaaggttattttctagatatttcataccaaacttgcaggaagagaaaggatgttatggtgaatatcttaattctcagcagtgcagctctgaactcagttgcctgacttaacaataatacctctccagtgatttttctccaatccattattatccctcagtgtattattccaactaacaaatttacatgatgaaacagaaagtggaaacggctaaagaatactaaaaaagagctgccagttaatgagtgtcctatggatgctattggtctttggtccactccatcaacgagatggtgggaggaaacaaagttgattatacacagggttacacatatgtaaagcaactagcacagggcatggaatatggtcagtacccaatgcagagctatcattcttactattacatgcagccatatcacatacaaaagaaacaaatcccagggaagttggtttcctcagttcacacaggtagtctgcagggatttgaacccaagtccattgagcaccaaaactttacctcttttcttccaaaaccccactttgccaaatgtagttgaatcaaatggtataaagttcaatgtgctgaaaattcacttgacattgaggttcatttgacaagtcaacgaagtctgagccatctaagtaactgtaacataacaagttgtttttatttttattttttctggagacagtgtcttgctctgccacccaggttagagtgcagtggcatgatcatggctcactgcagccttgccttcctgggttcaagtgatcctcccacctcagcctctagagtagctggaactacaggtatatgacaccatgcccagctaattttttaattttttgtatagatagggtctcactatgttccccaggctggtggtgaactcctggactgaagaaatcttactgcctcggcctgtcaaagtgctatgattacaggcatgagccaccttgcccggccaataagttgtttttagattcacatgagcttgccactcagcatgagattacccgtatattttcttagcctgagtaggcaaaataagtcaaaacttatttaaaataacaaaactactctgccccatatataaatctcaacactatacaccttttaatgatcatatttgggtaatctactatagaaagtggtacaaacccttgataggaagttatttctactacatgctaccaatcctcatgaaggatttgtgacatacacagtttcttctagtaatgttagcatcttaggcaaaaacttaaattgcctctgtatgttctgtcaattcattaaaagataaaggaaatctaagtgacatttgtttatgaacaaattgctcagagaactgaataggaaaatattcgctaaattggcatactgttaaaagaatgatgaatccttgttaatagaaaagaaaatgccatattcacataaagtgtgtatctgacaagaagaatgatacagagggctcaacaattggcctgggaacttgattaatgtataaaggaagaatgaatcatccattcaattcctgaagatgcatcacatacctgctgcctagcagggaagacagacatggatctaccatcagcaggacagtgggggaattcccactcatgacctcccctctgtcccccctgagaggggctttttccttaatagtaagttgtcccactgagcaatgaatggcccttcctgagacctaaagatgaaggccaaagaaaaaaagggcatctgtagtagaagggtcagcgaggggaggctctatattcagaggcaaattattattttttaattatgaaggtcttgaattgttcacaaatattccatccttccagcatctttcactctgggaagtagaagaccagggaagaaagatcctgctctgtgacaaggggagaaaaagggaaagactgccttaaccaggaagcctccaggcccacagcctaggcccatggatggacttgggggagagagtggctatgaaccacctgaaattgtatacaaaattctgtgtttgcatcagatctcaaaggggtccatgaccgccacaaatttaaaggtcaaagttcgagcagaagtctgatataaaatctcaaatcctgggtcttttgcttattagctacgtaatcactcaaacttttcttaagtttagtttcctaatttgaaaatggaaaagataatacaacgcctaactcattgtgaagattaaatgaggtaaataaagcttccagcacaataacgctcatttacccaaatggagacagcagaaagtcaaagcttctagagatattagaaggaatggaatctgattctatacaccaaagacagtgacagcacttagagcccccaaaacaccatcagttccctcatgtccaccattttgtaattcaccttacaaatctcgaatgagtaaattcatgcttaattccacatggtcctgagactacactactgtgacagactgatggtaagaaaataaggacatctggtatctcaagggaaaaatccaatactgaaaggaaaacatcttaggttattagcctttaagtttattaggcactaagtctaggttgaataatactctattcttcaaataaacaggtttccaaattctgcaataacttgtgattgtagaatagactttaaaatgcatatcctccatgtttgtatgtgtaatttccatacttatttatatggctaattcttaattacctagaccaaagaagaaaagtaacaaaacctaaacatcaagaaaaatccctgatcatttataattggtgttagacttgggaaagctttctctatctaggtgagaggccaaccaacctaacattatatttgcttcagacggtccaatagctctaactgaaaatattcacagattcttgtctctacctcggtcttacttgttttataacgtacatacctaaatgaataactacttggcccaaaaggtaaaaaagtttctgggtactagacttttactttacatatatatcagctatttttagagtccaaatgaaaacagctagtacacaaggaaataagcatgaaattcttgatgtctactcagataacagtcaagataaggtcagtggatatttggaatacctaagacactaatttaaaataaaacactttgatggccaagaacactttctaaagttgtgcttgagggttatggtttgcgttatatgcttgattcctctctattctaacaaatcccctagcgaaaaaatatccccatctgccataaggtgctatgagaagtatctgttcaaagtccagtgaggaagctgacactcccttgacacagcaatcttacatcagggagccactacaactagatcactttctaagtgtttcagaagaagccccaaagtgaaaaagaagagtctaaagaaaatggtgcttttctatctgtatacaaaactttggaaatgtttacctctctccaggaaataaaatcagagcaaacaaaggctgacttaattgtactgctgtccatgtttatcaatctaaattcaaaactaaactcttaatttttaaactaagtaaacatttattcagcaacaacataggtgcaaggtgccatcccagaccctggcaatgctccagtcaacaagagtcctactttgatggagcttacagtctatggaacaaaaacttgacattgtgtgtaacgcactaaacacacaatttaaaaaacatttcgtaaagatctatgataaaccaaagcctataattaagaaatgagaggccactatatatattttgctagactttcatcttcaacaaaataccctggaggtaatttttagcagtggctcagtatttaactcaacttcaaaacaatagttatgtatgaaggccatatatgggaacaacaataaagacgccccagcatgcacacacccccctcagaaacagctgaaagaaaactgtcctctaagttataaaactaacacaatataccacagcaaacatgaaaaaaataaccttgaagagacttccatggtttcacaacttccccatatcctgaggattaaaaaactttttaggccaggtgcggtggctcctgcctgcaatcccagcactttgggaggccaaggtgggtggatcacctgaggtcaggagttcaagaccagcttggccaacatagtgaaacccagtctctactaaaaatacaaaaattagccaggagtggtggcaggtgcctgtaatcccagctacttgggaggctgaggtgagagaatcgcttgaacccgggaggcggaagttgctgtgagccgagatcgcgccatttgcactccagcctgggcaacagagcaagactccatctcaccaaaaaaaaagaaaagaaaagaattcctatgaagagaatttggtcagttactacaacaggggataggagtcactaataacaataacataacatcaacaaaaatggtaataaagaagaacacttattgagagtttcccaaataccaggtcctttgctaaatgttttacatttaacaccgaatcctcataaccactatcaagtaggtactattattatccccaacttacaaatgaaaaatcaatgaacttgggaaattaagtgatttaataattacttaaatgacagcacttggatgcaacctaggtgtttctgaatactgcagactgtcttaaccactttactaagcagccatctcaagaggcagacaggcactgaagcaccactgaagcaccgcgcagaggaaaaggtgccctgactcaaaggaatttgtctggtcctggaggcagcaattctctgcttataaaaatatgtactttttcttttcttttctttttttttgagacagagtctcactctgtcgcccaggctggagtacagtggcgcagtctcggctcattgcaacctctgtctctcggattcaagtgattctcctgtctcagcctcccaagtagttgggactacaggcatacaccatcacgcatgggtaatttttttgtatttttagtagagatggggtttcaccatgttggccaggccaggctggtcttgaactcctgacctcaggtgatctgcccacctcggcctcccaaagtgctgggattacacgcgtgagccaccgcgcctggccgacttatgaaaatatctactttttcaaggtaacattcttctgattccatgttcaccaagaaacttctggtttgttctggttcccatgtgccctaactataggaaaatcttggcctaggcagagggcacacatacctgggacccttggcagttccttactgcttataaattactaaacttgggtcctggttttacacatcatttttagcgagctagattaaatcaggtcttcccatgacatgagatttttgagcctgactcttgcactctggattgtgctgattccgtcaaggtgatgccccaggcagtgcccatgcccaggtggccacttgtgtcaccacctccttcaagcctctacagcatatgcttttaaaattggagaaaattttctagctccccttaaattccacaaggactcacagcctctcttgaaaaaatgttttgaaactcagaagaatgataggcagggaatttcaacagctttgagaaactactgctataacgaacagcaatattttcctaagggaataattcattttcccatttttaaaagttactttggctcacgcctgtaatcccagcactttgggagaccgaggcagacggatcatgaggtcaggagatcgagaccatcctggctaacacggtgaaaccccatctctactaaaaatacaaaattagccgggcgtggtggcatgcgcctatagtcccagttacttgggaggctgagacagaagaatggcatgaacctgggagactgagacaggagaatggcatgaacctgggagacggaggttgcagtgagccgagatcgcgccactgcactccagcctgggcgatagagcgagactctgtctcaaataaaaaaaaaaaaaaaaaaaaagaagttactttctgtagttcaaatatggtgaatttaaaagaaagttagcaacctaagttaactacattggatacatgtatattaaccacgttgcttttaatttaatacaaaatatcttagacacttgtaaaaatatgacagctaaaaatacaaacaaaaaaaatacccatatacccagtgtaagaaacactactgatatagctgaaacccctgggtatagtgttatactattgtgcggcccttgtaactgtcattataggcccgggcacgttggctcactcctgtaatcccagcactttgggaggccaaggtggacagatcacctgaggtcaggagttcaagaccagcctggccaacatgataaaaccccatctctacttaaaaaaaaaaaaaatacaaaaatacaaaaattagccgggcatggtggtaggcacctgtaatcccagctactggggaggctaaggcaggagaatcgcttggacccgggaggcagaggttgcagtgaaccgagatcgcgccattgtactccagcctgggcaaaagagtgaaactccatctcaaaaaaaaaaaaaaaaaaaattgtcattatagaagtgaaatggtattcaattaagcaagagggacttttccctccatttatatttggacagtagcaaagttttccacccaaatctatatgcgataattccagatttgcttggtgggagaacagtgcaagaaaccaacatactgatatttcttggtatgaatcacacagagactatatgtacaaactagaaacaggtgtgaccccactcagattatttctgaacagtcatttgttaagattaggcctgatgcctgagccatctgtttatatgctacagagcagagcttctggggctttcaaagaaaaagtttgctatacaaactttctacccatgactgttacatttatgttggaaattgtgggacagactctccacaggcaaaacattttctagggaccatgcctgtttcctcttctgttaaaaatcaggctcaaaatatacccacagctatataaagttacttgttccctgagactgataacttctaacaagggatggcaatttctctggacttattaacagaaggaaggcaatgcctgtgggttcagttctccctgtatttactgaacacattccacacctggtataaaaataaataaaccacagttcctcaagaagctgactctctaggcgttatagacagacctggtgcacgaggaagaaaattacaggaagaagaaaccataataggaaaaaaaaaaaaaaagtcgaagcaaccaaagtaaataaataaataaataaatagaatataagccactaagccaggcaaggtggcacacgcctgtaatcccacctactcacaaagttgaggcaggaagataactagaggaaacaactcccagaccagcctgggcgacatagcaagactccatctcaaaaacacaagttaaaaaaaaaattagctgggtgtggtggagtgtacctgtagtcccagctcttggcaggctaaggcaaaaggatcacttgagcctaggtgtttgaggatgcattgagctatgacggtgccactgtactccagcctgggtgatggagtgagacctcatccctaaaaaagaataaatgcaagtaagcagggactggttactgaggcctgctgttctggttttctttcttcttcttcggcagtttcatctcagtttccttccaacactttcccctcctctaatctaccatgaggggtctgcgatgtcctctttttctcccctggagagcctcataccatcttctggctttaatgaactcacttaggctgatacttcccaatatcttccctctaacctggatctcatgcctgaactccagatcagcagatccatctgtctattcaaaacctccaactggcacctcaaactcagtatttctaaaactgaactcaccacacgctcctccttgcccctaatagatctgcacttcctttcacatttcctctctgttatagccccaccatctactgaaaacctgaatatcaaccaggacccatgctaacccttctctattactcggtaggtcctgatccagattccaaccacctctctccaaccctatccaactccaggtggctaccatctgtacctgaaccactcccctcaaatcattctccaaagggctcactcttcacagaaacaatcgtaccacacctgtttacacccttcattaacttccccactaccctcaggataaatctaaatcctttaacaaaaaatcctcattgtgtggcccttacagtcggcctttcctccacgcacttcaggcttcaggcagaccagcttcctctgcgtctttggtcctgtgcagttctctttgttggaactcctccagcccttgataggactcccttgccccatcctcaggtcacagctcagaatcaaattccctgagcagccttccctttgctgcacctccctctggcctatagcacaccctctacttcccttatcacagcatgcatcatgcctgttttcttactggcaacaacactagggtgagcttccaagtatgtatgtgcttggcacttacgcatcttcagtactgagtgatcatataagtgattggatggtcaccaggagcaaagttcatctattcctgactttttaggtggaataaccagtttctctaactttcccttacccaagaaccaggtagccaaaggtagggagggtcctaggtttaattagagacctttcttcacaggccttgcataacattttaaatttaagacattatatggatacatgagtactccataacttcctaccaactagattaggggtttcctgggcaaacctcccaatcggtactctaatagactagttagcagagcttacaaccttatgctactctgagaattaggtgtcacagtcatccccatggttcagatggagaactggggctcagagatatcacataacttgcccaaggtaacagaagcagatggtgaggaaactagaactcaaactgagttcaggcagtatgtttctagaacctcgatctggcctgtaagaatatagtcaatgaattttactcaatgaatgttgaaagaacgaagtcaagagccggacatggtggcacatgcctatcgcgggaggatcgcttgagcctaggaatttgagaccaacctgggcaacatagctagacctaccttgactctaaaaaaattaaaatgaacaaaaaagaaagaatgaagtcagtaaactgtactagagatcaggatgacctttgggggtatattagaaaatggaaatttgaacaacccaaagtgtattcacatttgattctggattaccttagagggggaatataaacatattcaaaataagaaccattagttcttatagggcaccccaaggggagacttcttaatctaatctattcctgcttcatgaggaggggactacaggctcaactcagacatcccagccagggacacacagtgagtggcccgtgggctagaacacacagccagcatgcgggccagagaagcctgtcgtgttttttttatttatttttaattttttttgagacagagtttgttgcccaggctggagtgcagtgctgtgatctcagctcactgcaacctccacctcctgggtacaagtgattctcctgcctcagcctccccagtagctgcgattacaggcacccaccaccacgcccagccaatttttttttttttttgagcaggtgtctcgctctgtagcccaggctggagtgcagtggagcgatctcggctcactgcagcctctgcctcccacattcaagcgattctcctgtctcagcctcccgagtaggtaggatgacaggtgcccgccaccacaccctacaggcgcccaccaccacgtccggctaatttttgtatttttagtagacatggggtttcaccatattggccaggctggtctcgaactcctgaccttgtgattcgcccgcctcggcctcccaaagtgctgggattacaggtgtgagccactgcgcccggccttgtatttttagtagagacagggtttcaccatgttggccaggctaggctcgaactcctgacctcaggtgatccaccagcctcggcctctcaaagtgctgggattacaggcttgagccacccgcgcctggcctgcagtgtctttaggtggcttacctcccgcagctccagcctctgggccacggcctcgaggctttcctggccagtgctctccacggacagggtgaactccacaaactcgttattaagcagttggatccgggcaaccaggcaactcttgctggacaccgtgtagcgccgggtgcgtttcagtttcaacccaaatggcagtggcatcttcttctttcttcaagaatggaggagcaaagagggaaaagctacccccaccaacccagcgctggtgacgccaggagaaagcgatcctctccggatgggacgaacactgtccggcctccagctgctcacccagcagccgctgccgccattaaaaagcaacggagtctccaatggcccgaggaagggagcattgacgccagcgctggggaaagaggaacgccgttagttaagcaaacgtaacgctgggctttgcttgtataaagaaaagccagtcaagctgtggccaaagaacaagccgtccctctccactggaaaaaaggcactaacaggacccggaaggcagggtggaattttatctcagagttgtgctaggctcagggtcagactccacccttcactgtatcctacaaatagggatagcaaactgggccatcctcaggattaaatgagataatagccagcactactataatcccaaattttgtagttagtaattgtgatcctcttcctattttggataaggtgttgttttttcataggtaactctttcaggttgtaatactccaaatgtcagagttctttagtccttaagtgagaaaagtgccaaatggccccaaaagagctaggtttcagtcccaatccctttagaaaattaaccctgaaggcaaatgggaggaataatccccactaagaaaggcaggtgtgtgattcaaacccggtgaggtgcctaacaagcgcttgtggaagtatttacgtcatcaaattgatttactgataaacatcataaaagaccctacaaatgctcgttatccatttaccactagaagagtggcagttctgaaaatccagaccccggcccctctccagggtggggacgcccaaacaggccttcacctaagcggagccgcggcccagaaggggaggcgggcgaggtcttccacgccatcctgagttaatgagcggccggaggcaacaaacccaagaagcccacggggccttggagcactcaggccccggcttctcccgcgtcctccccttgggaagagcacgcggcgttgccaggccaaccagtagactcggaggccccggaaccctctttctgcagccgcgtttctggacggacgcgctctaaaaggaccggtccctcggctcccgaagggaacatttaaagggaccagcgcgtgccctactggcggtggagaggttgggcgggccccataggatgcccgctttggagccacaggacctcaaaatacgctccttacaacgtgttttatagagcgaagtctcgctatgccacccaggctggagtgcagtggcgccatcgtagctcaccgcagcctcgaacacctgggctcaagcgatcctcccgcctcaacctcccgagtagctgggaccacaggtgcgcgccaccaagccgggctctaacagtttttaaccagacctgttgatggtttctggggcgagcactagctggggatttttatatcagctggattagttttttccccctaaacgagtctacaaaatcccggacatttccagggtcctgagacggttccctaccttccttctgcgcagagattgcctgttggggatgaatcgcttagcgagacccagccatagctggctacgctgagttccggcccgggaccgcgcggagaggcaagatctattcccgaccctctcatctggcagacagaacccaggcttcaggaagagaagcggctttcgcagtttcacgctaggacgggctgagctgggaatcgatcccaaattccacagtcccagtcctctcctgggtcctgctctcctgactgcgtctcaggcccagaggtgatggggcacttagggttagggaatggcagacctggagaaaagggttccgctactaccctcggctttgccaaacttaacattttgaaattccattccacaaatgtgtattgcgtctctgggaacaagacagcgtaatgagcatcgtgagaaatctaagacgaatccctaaaccgtcgctgtctttaaagagattacaaccatgctataattacatacagagctgtatctctaataaggacccaaccacggttttatctggctagtttttttgtttgttttgagctctggttatttcccatagccaggaaaatcaaaatattaaaaacaagggataggggaaggccagaagaaaaaaacaacgctgcaactacctaaagcactgtgttaattaaccgcatttgctgagtgccttctgtaggtaaaagcaccatactatggagggaaacagaaaataagtattaaaagatatggtttccacttccagtagttttcaatgctctttgctgtttcaggggtataaactaaataagtaaagcaagatggaaaaaaattagcaaatgacaactttaaataataagcttttaactagaaaattgataaaccaagagtaaatatttaaggattataaatatgcatactaaacaccctttcatgagatcagatggtgggtttcaattttacataaaaattatggtaactggaaaccgggcggattaagtagtgtagatgaacagacaagatattgcatatgtgtagaggaaagataaatatttgtattaggtgccattcaaatatggtagtcttttcactacatagaactatgccttgaaagcaatagatactacactgtataacttaattattaacttaagctctgattaagcaaactcagtaaaactttcaattgtccctcagacttgaaatgtattactgcatcagggataaaggaaaagtcaaaattatctcttattttggtagatgaaattgaaaaagttgcagtgtgtgtgtacatggtgcatccccccaagatctatccataagaatggcttgctttttgcttatttatataaaacccactatgttaaaacaatgattttgtttaataatttacaaatttatcaatgatttatacatcttaattttcagtaatatgcagtatttgttgccaaatggtgtaatacaattatgaatgtctgaagataataaaaccaagatgagtagaaatttaagagttctttggggaggtctgtttcaggtataaaataatatgcaataatatgaaagtgattgggtctggaattataatttactaaagtaaacataatttataaatagctattaaaggaaaactaggatataattttttctctacaaaatctttccgttttgtggtaagtaaacagatacatactagattctgcttcagtacaagtttacaaaaggcagtctgaactatttgtgaattcattttaattttccctctctacaaccctttccaaaagttcctcaaatacactttacctctcaatcttacagcgtttcccctttcctattaaggtccttaccacatgtaattttgccaaagttgctttaaaataaaataagcactaaaaggagagagtatgtgacatttttagagtaatatctatagctatagcattaaacccatgtttctcacggagaaaacatctgtgcgtagatgctccagaataaaatgccctagaaacgaaacggactatattcagagtaaaattactgtcgtgtcccaaacttaaaaaaataaataaactgtcagcaactattaggcatacagcagttgtcacttggagcacacgaatgttctgaatgtgtttgtgagcatacgctattagtataaggctttctcagcaaaaaagaaaataggacgagcatgccaagagcggccaatctaatcaggatttgcagaaatcacaagtcggaatttgcagatccaagaattcttgtttccagagtaaatactctactccaaaaacaaacccaggcgttaccaaacagtccttccctgcgccccttctcgccaaagttatctggcgaatttcacgtttatatattctgagaggcacaaatatgcctaacacatttaaaaccctgatccagaattaacccgcaacaatcggccagggcgttcggaatagaagttcaagactccttttagaaattactcaagtatatgagagcgaacctgaaaaacaagacttttctctttgttacgctcccgctacgggtctggccgccgcgccccattctccgggattccggggccgcgggcgcgctccggggtccgggcgagtggacacaccccaccgctcgggccagccgcccgcccctcccgccggccggggaccgcgccctcacctgctcccgctcccgctcccgcatcctcggggccgcgcgccccgctcagcgacccgcctcccggggccccgccgcgcggccgccgcagccgcacccgcacgccagcccgggccgcggcgcgctcatggggctcgcacgcctcacttcctgtctccaaaaacccggctcgcagaccattcccctgggcagagtccggcggtggcgacggcgaggggcgaggcctggaggtgggaccggccggcgaggagcgccgcacaaagaagccccgtgggggcggggggtggcaggaggacggacagaccgtcggaccgacgcgggacgcgcggccggagcagcggggcggccgggcccaggcgtccctccccctgagccgggcgggcggatccggggaggcggcggcggcccgtgacctcagagagttggaatgcgggcagccgcgcgggggaggcgcggacagctgcgcccggccgccggggagggggcgcgccgctgctttttttaatcgtatgaccacttattttaagagtttccaaataaagcaaggcttttaataaaatgagtggagggggtattatttaggttccagataaagggttttattcctgtgttattaggtaggctgtaaaatgctgttattgatggttattcgtttactctggtatatttctgaacactattggaatacatttcttcttttcctgcttgctcctaaggttatgccccatataactagacacttccagtactgggtgggaaagcccccccaccaaaaatggttcatatgcctcaaataacctgtcagtccccaaaagggagctgtctgcttatgcaatatagagcagaactgttaaggatggagacttgacaaagttgtcaaatcccagctccaacatttactagctggatgaccttgtgcaagtttcttaacttctctttacctgtttcctctcctataaaagagggatattaatatctttgcacagcaggggtgggggaaataaatactaagcaatatccaataacttgtgtaaagtatatatgaagtgtttcgtttaaggtttattatacagtattcttgtactgcattattactgtattgcagcacttaagctgaggaataaaactgtgtgaccctaccactattacaatagtgtaagatcttttcttggcatgtggaacacagaaccttttaatttatgtaaattttaatttcagtgattttgttttaatgctgttgtttctggaaagctttttaaagtattgtttcatgtaaatctcattttcttaaacaattaacaaaaacttttgaatacttaactctgcatgagacgtggtccctgcacaacacggacttttggtttagtgggtgataaacgcacctgcacaccacacacgcagtacaaggccaaagtggggagcattgtcatagaggtatgagtgctatccaagagcaaagcccagcaaggtgcatcttgggtcgtttagctaaaggcaaataagattacctgtgtttctaagggaaaaaaaatagatcaattctgtttgtaattgatatttcaactgaactctatgagggggtcaatttgtgtgtgagcaaagaaaagagatctaaaaagaagtcactttgctggcttcccaaggtagaaaaactggaatcatgtgtgacttctcccattatcatctccagcctgtcatcaagacctggtatttcctcctttgaaatgtctcatgaattctttgtttcctttctgttccccctggaacattctaaatccaaaccctcatcattttacatccggattattgcaacaagggtggtctcctggcatctggtttctcagttctctcttatttccttgctaataccaggcttccttctcttatcactcttaatggactcccaaggttaagttcttctgcctgacctatagggactttccaaacgggcctctctgaccacctatatcgctttctgcccctgtcaagctttgcccctggccagcagcccctcctgccctctttccacttgtctaagccttctgcttctctgcaagtaagactctgcttccaggatgactttctagccacaccattccacagtgatctccacacttggcaagaactgtaaaagttgtttcatgacggcttcttttatatctcctaggattcctaggacagtactgggcaaagagtaggcactaaataaaaacttgttaattgaatcaggaagaaaataaaagaattttaaaaatagaaaatgaccataaaacccaagagatgttagacaactgagttgaacttcctccctcacagtccacagatgtcatttactgaccaagtacctaagccctattttccctcagctatgttaatttggcaggaacattcatgggaaggcacttgaataacaccttcaaaatattagacataaaattattagcttgtgttgcatatctaaggaagtgagataatttatatggtgccacccccaaagatacaaaagggtgtaagtaaaaagtccccttctcaccctgcctgctagacacccagctcttctcctgggaggtaaccagtgttccctcattcctctgtatccttacaaagatgttctgcagagttacaagaaactacatataagtatctttaccccctcttgttatccagaaggtggcatacttacacatacttttacactggaagttatttcttactaaaataaataaaatgtaaaaagaaagcccagcacataaaatgatgaaagacaaaaagatgaaagaaggctgggtgcagtagcttatgcctgtaattccagcactttgggaagcctaggagggcagatcagctgaggtcaggatttcgagatcagcctagccaacatgaagaaaccccgtctctactaaaaatacaaaaattagctgggcgtggtagagcatgcctgtagtcccagctactggggaggttgaggcatgagaatcgcttgagcccaggaggcacaggttgtggcgagccaagatcacgccactgcactccagactgtgtgacagagcaagactctgtctcaaaaaaaaaaaaaaaaaaggaaaggaaattgtggtttggtgggtgcactgactagtgttttcttagaagttcaaaagttaatctgttttgatagcatggtgaatacccaccgtataaattatcatcatctgcaaaaatccaaattgaatgaatgccctgccacgcaaagataatgattcctgtctgggcgcggtggctcacgcctgtaatcccagcactttgggaggccgaggcgggtggatcacgaggtcaggagttcggaaccagcctggccaatatggtgaaaccccgtctctactaaaaaaatacaaaaattacgcccggcacggtgactcacgcctgtaattccagcactttgagaggtcaaggtgggcagatcacaaggtcaggagattgagaccatgctggctaacacggtgaaaccccatctctactaaaaatataaaaaattagccaggcatggtggtgggcacctgtagtcccagctacttgggaggctgaggcaagagaatggcgtgaacccgggaggcggagcttgcagtgagccgagatcgcataactgcactccagcctgggcgacagagcgagactccgtctcaaaaaaaaaattagccgggcaggtggcacacgcctgtagtcccagctactcaggaggctgaggcaggagaatcgcttgaacccagtaggcggagattgcagtgagccgagatcgcaccactgcactccagcgtgggtgatagagtgagacgctgtctcaaaaaaaaaaaaaaaagatgatccctgaggaaggggacagtgagggctagaactagaaatgtgtggccaggcgcggtggctcacgcctgtaatcccagcactttgggaggccgaggcgggcggatcacgaggtcaggagttcgagaccagcctggccaacgtgatgaaaccctgtctctactaaaaatacaaaatttagccgggtgtggtggagggcgcctgtagtcccagctacttgggaggctgaggcaggagaatcgcttgaacccgggagatggaggttgcagtgtgccgagatcgcgccattgcactccagcctgggggacaagcgccagactccgtctcaaaaaaaaaaaaaaaaaaaaatagaaatgtgaagtcttcggtctctgaatctgcaccttaagttctgcctaccacactcaatactgtgtcacatgcaacaccttttcagttgcaaaagagcaaccattttatggatagattcccctggacatcagagaaatgattatcttggcagtgtgtttgttgaaatggagaagcatgtctgcctcagtagcaagtgactgctgtgactgtaattcccaacacttagggcttttgatccaagtatgtctatgccatgtgataatcactattggaaaacacttgtccattcagcccacatatatttagaagccaggtgctgcaaggagaaaggtaaatagatgcatacccctgtcctcaaagactcaccatgtgaacaacagatgaatatgtaattgtagtaggtgaggaaatttatacatggttatactttatagtctgaatggactggtaatgtctcgttaatcactgtgatcagcttctgcttgagtctggaaaagcagactcaaaaggctgacaaaaaaaggttgactgagtactcaaagaaaagcaaagctttgggcctggcacggtggctcacacccagcactttgggaggtcgaggtaggcggatcatgaggtcaagagagcaaggccatcctggccaacgtggtgaaaccctgtctttactaaaaatacaaaaattagctgggtgtggtggcacgcgcctgtagtcccagccactcgggaggctgaggcagaagaatcctttgaacccaggagatggaggttgcagtgagctgaaatcacgccactgcactccagcctggcgacagagtgagactccatctcaaaaaaaaaaaaaaaaaaagaaagaaaagcttttcaagcaggaagacacccccactcccaccccaccttcccccatcccctagtgcttctacacactcacacacgcacacacgtgcaaaggatgtgcaacatccagctgaaatacaacctgagaagagattgcagacgtggttggggggcaatgttagaagactcatggctccatggagatggggttggtactcagcccttctgacttcaaagccaatgctcttttcagtcatcttctctttttggaagacagcccagagccctcttagctggcactttgggtttgttgaaatctggtcttcacactgtcccctagaggaaaacatgttgtttcccctaaatcagagaacatttccaagctgggaaaaaaaaaaaaatactgtccagtatagtctttttcaagcctagcactcctactccctctaatggcttctcttagggcattatcatgaacatcttcttcgagatgtgatgtagtttgtgaagctgcagtttacagggaagtgcctggaactgcactggaacaccaaatgaaccattggtttagtgggtttgcccctcctgtgatcgagacatcataacatcttagatctaaatgtgggaggtctcaagcagcctttcagtctcttttccacagttgtcctaaaagttagctcatggtcctaaaagttaacgctttcttgaatatattttaataagtttccctactctgaatatgttttaatgaaaacattactttttattaaatgttattctcaatattatgttaatattgactgagaattgggtacccagtaatggtaaaacatgtttttgttcttagttctgaaatggctggtaaaggaataaaagtaattcatctgtcttttgtattgtgagtgtcatgaaagcagggagttggtcttgctcctctttgtgctctggctcctaccactgtatcccagtgcaggtacttaatttttaatcagcaagcatagtactgctataagccaggcacagttcaatatacttcacaaatattaacttatttcatccttatagtaaccctttgcaggtgaaactagtatacctatatcacagataaggaaactgaggcacagagatgagaagcaatttgccgaaggtctcagagggagtggcagagccaggattcagacccagacggtctggctgcagtgcccttgttctgtgtcattctgctctgctgcctgtcatcaatgctgaatgagtgtatgatcactggatttatccttgaggaatgcttttgtaaattaggtctttaatttcttttaccctattaatatttaatgagtgcttactatgtgtccagcatcctgaaaggttggagaaatataaagccctacagagagtttataattttgttagggaagacacacacacacacacgaaataacattgcacagaatatattattatactaatagcttccatatagatgccataggaattcacaagaaaggattatatgagattattaaaggaccacgtgacagaccctaggtagccccacaactcctgcttctgctgtccccacaacccactcctgacccctagtgtggattgcttaggtaataaacatggcaaaaataagaggtttggcagatgtaattgaggtcgtgaatcagctgattttggggtcaggtcctgggtgggcctaacttaattaaatgaaagcccttggctggtctcaaacttctggtctcaagtgatcctcccacctctacttcactgagctgaaattacaggcatgagccactgtgcctggcttttactggcgtaagtgaacagacatgttagtgaaccctttggcaaagaactgtgggcagcctctaggacttgagagtggcttccagatgatagccagaaaaaaatctgggtccttactcataaagccacaaggaaatgaattatttttttttttcctgagacagggtctcactctctcatcaaggctgtagtggcatgatcttggctcactgcaacctctgcctcccaggctcaagcaatcctcccctctcggcttcccaactagctgagactagaagtgcatgccaccacgcccagctaattttttgtacttttgaagagacatgtttttgccatgttgcccaggctggtcacgaactcctggtctcaagtgatccgccagcctaagcctcccaaactgctgggattacaggcatgagccaccgcactcagccagaaatgaattcttgctaacaacctgaatgagcctgaacatagattcctcctcagtcaagcctccagatgagaatacagcctgcctgacacgattgtagccttgtgagaccctgagcagaggacccagtgaggttgacccacggaaaccatgagatgataaacgtttgtgttttaagctgctaaatttgtggtcatctgttatgcagcaatggataacagagaccactctcaggaattagtggatatgagggagaaaggagacctctctgtgcttcctctgtttcccaggttttgtgatcagggatagggagaattcggctattgatacaaataggggaatcaacagtagtaacctattgagtggaggaaggggagatgaaggcgacttctgtctaagcgctgagttgggagaaaataagagtagttacttagaatttgggagtggggtttgtgtgagaattcaaggctgatggaaaattcggtcattatcagcacagagttgacaacttaagtcctaagaacaaaagtgttgtcccacggagggtgttcagagaagcaggaggatgggattcgtctcggggagaggccacgggtggccctggaagaaggaaggcagaaccaaacccaggagggccagtgtactgcagagtcaaagagttgacggattggctctgttgctctggatagtccattttcccttcaagggtaattgcagtgcaacctctaatgggcagactccattttacaggtaagaaaagttgaaatacctggaccgataccatactgacagtaagtgagggctggatttgaactcgcgtctcatatcacagcccaagatctttctgctacacatttaattcattcttaccatccaagagagaataaaatgaataagcggagggccagcagagagactaacgaaaggtccccgaggtgcccgggaggcggagctgcaagaccacccgcacgcgcacgccgccgccctccttgcctgagcacaggtttcgcgggtagaaggcgtgcgcaggcgcggacacgggcgcatgcgcgttcactccggcgcgcagtgccggccggggcggggatacgccgtgtgcgcggccgggggcggaacggaggaggaggcggtggtgtcccggctgcggggtaggagtccgcggcagcctccgggtaagccaagcgccgcgcagtgctgagttcccgcacgccgcagagccatggagatcggcaccgagatcagccgcaagatccgggtgaggcccgtgccggtcgggggtgggaagccaggtctcggcgagcgggcggttgtcaggagtaacggggactgtgggcccgggtggacgccgcggcctggcctccgctggacgctcctggcgggctgcggctcctcctcgtccaggccgcctcggccctggggacatttgcggcctcggagcgtggctgcggctgaagtagccgccgggaaatggaaggacaggcgcaggcccggctggagccaccaccgcggcgcacggcgccgctttggatccgctgcgggaggtgggcgccgcggggctggggctggagctggagtggggtgcggggtggggggcggtgcaggcgaggctcctcccagcccccgcccgggggatccgaggtgcgcgcaccagcaaagtggcctcagccgctgcagagtccggtcttgttttcctagagccgcctttctcacatgcacgtttgctctttttctctcagagtgccattaaggggaaattacaagaattaggagcttatgttggtaagtgtttttttggttgttagtcttacagaatttagagtttgcagctaatagaattttagtgaatgcgtatttctcaccgtactttggacattgggagagactcccttctaccttcttcaaatcttatactccctggttacttctttatcatctttttgcaaccttgttttttttctcccaaacctccttctgttatggtgttttgaaatttagtttcctccgttaaggctctgtttgaccgaattttattttatgtttttcctattctctctctctctcattttaaattctagggacgggtctcgctacgttgcccaggctggtcttaactcctgggctcaagcaattatctgaccttagcctccctaggtgctgggagtgcggggattactggtgtgagccaccatgcctgtttaaagtttcctattcttgttactttcctcttgacatttgtttttagaactctgatgttggatgtgaatgtttgatgctttctggcatttgcttctgtaatggttcagtgagttttattttccgatctctttatgttttccctctctctctgaaacagtaaggctttttccgtctctttattcttttataatttgagtgtttactctgggtcaggtactgtgcttaactattgtatatgtattaactcaggataatccctacgagaatcctggaaggtaagtggcagtatctttgactgtgtaaacaaggaaactgaggctttgcctacttgagcaaggttttatggtttgcccccaaagctggtgcctcctataaaaataatagctaccactaatgacagtggttctcaaagtgtgggagactccaagggcctctgaagtcaaaactgttttcatattaatactaagatggtatttgttatttttcactgtggtggtggtgtttggattgtgtaaaactaatggttgataaaacttgtcagcatagtaacaccataatgaaatcatattcaaatcactccccccttgtagtttttttctttttgagccaattacacttaaaatgtcattgatgaagatgtgaagtccagggtttacaaaatatttttta

SEQ ID NO: 371 - DNA, 173410 bp, Homo sapiens
ggcctgagaaccaggagctctgatgtctgaaggtagaagatagacaccctacctcaaaaagaaagctttcttcacctttttgctctattcaggccctcaatgaattaaataatacccacccaccctggtaagggcagatttttttttttttttttaagagatggaatctcactctgtcaccaggctggagtgcagaggcgcgatcttggctcactgcaacctctgccccctggggttcaaatgattctcctgtctcagcctcccaagtagctgggactagaggcatgcgccaccatgcccagctgattcttgtattttttgtagagacggggtttcagcatgttggccaggatagtctcgatctcttgaccttgtgatcctcctgcctcagcgtcccaaagtgctgggattacaggtgtgagccaccatgcctgggctttttttcttattttttgagacagtgtctcactcttttacacaggctggagtgcagtggtgcaatcatagctcgttgcagccctgaactaactgggctcaagtgatcctcctgccttgcttcttgagtagctaaggctacatgtgcacaccaccatgcccaggtaattttttatgttttgtagagatggggtcctgctatgttaaccaggctggtctcaaactctgggcattaagtgatcctcctgcctcagcctcgcaaaactctgggattacaggcaggagccaccacacctggctggcagatctttactcagtctactgattcaaatgctaatctcttccagaaacaccctcacagacacacccataaataatgctttaccagatatctgggcatcccttactgtagccatataaaactttgtgacattaaattaaccatcacactgggtatagaattctagattgacaggttttttttttttttacagtactttaaagatactgttctgctatcttctccatagcaaaataagaaatttgctaatatccttgtcgttttcttctgtatataatgtgtctttataaaattgcaacctctggttgcttttaaaattttcctttttttctttttttgagatggagtctcactctgtcgccaggctggagtgcagtggcgcgatctcggctccctgcaagctccgcctcccaggtttacgccattctcctgactcagcctccccagtagctgggactacaggcgcctgccactgcgtctggctaattttttgttttttagtagagatggggtttcaccgtgttagccaggatggtctcaatctcctgaccttgtgatccacccacctcggcctcccaaagtgctgggattacaggcgtgagccaccgcgcccggccttaaaattttctttttatcacttattttgagtatttgggccagcaggaattgtgagacaccagtagaacacagtgtaaatttttttgttttttttgagatggagtttcactcttgtcacccaggctggagtgcagtggcatgatcttacctcattgcaacttctgcctcagcctcccaagtagctgggattataggcgcccagcaccatgcctggctaatttttttggtatttttagtaaagatggaatttcaccacgttggccaggctggtcttgaactcctgacctcaggtgatccacccacttcggcctcccaaagtgctgggattacagacatgagccactgtgcctggccaacacattgtaattttgcatgaatgcacaagtaaactcatttctacgctcagcgtgtgcatagcattatagtttgaattgtatcccttcccaaaaatatatgttgaagtcttaacccccagtacctcagcacctcggtaagtgactttatttggaaataggatatttacagaggtaatcaagttaaaatgaggctagtagggtaggccataatccaatgactgcatctttataagaaagggaaatttggacgcagagacagatatgcagagggaagaagatgtgaagacacacagcgaagagacagcatagtactggagtgctgcatgtataagacaaggaaggcctgggattgccagcaaatccaggaagccaggaagaagcaggaagccagaagccaggaagaaacaaggaaggtctggcctgggattgccagcaaacaccagaagccaggaagaaacaaggaaggtctggcctgggattgccagcaaacaccagaagccaggaagaagcaaggaaggtctatcccttacaggtctcagagggagtagggccctgctcataccttgatttcagacttctaggctccagaaatgtgagacaatacattaccatgcctgactcgtatgttttataccatctggttttggtgcttaacaaccctaggaaatgactacatgtgtgtttcatacatgtgtttgatttggagcattgcacattaccatgccggactcgtatgttttataccatctggttttggtgcttagcaaccctaggaaatgactacatgtgtgtttcatacatgtgtttgatttggagcattgcacagttcccaatcactcaatctccctctgcacaaacaggttacaagaatccatcaggaccagcaatccacactaggggtacagcataccaggtctggagccctgttggctctccattattccacttcatcaagtgccctgttttttgagcaaattgcaaggtttgctagactgaccactggaagatggtggctgctgcctcagtgagcttttaattcaaagggacaactggtctctggaaccagggaaccaccatgttcagtccaggccaaattgccaaacttcccagttgtgaactaaataaatgattgttattttaagtcactgtgttttggaatggcttattacatagcaaaagataataaagccctctaataatgcttgctttaatatttgtatatttctcatatgaatgcatttactttctctctttttgtacttgaatgagtttggctgaatatacaattgtaagttggcagttattttctatcagttcactgaagacagttttctactatgtgctaacacggttgctgagatctgatgtcggactaattacagtatctttgtaagtattctttctctgtgaatatttatttctcattgatacactacagtttcacactgatgcatccaggggatgtgtgtgtcctgtcttggaaatgtttccttcctcattctgaagatatgtgtgtcttttgttaagtcaggaaattctctattttctctttaagtattgcctcaccctttctattttcttcttccagaactctatatttgatttctctctcccccacccgctttttgtcttctgagagcaaggtttaatgatgactcagaattatgattataatcatttttaaagtactaccaattccaacacgctgtgtaggaattactcagactttttacccctttaacttctgaaaaaccgaagtgactaaccattcctggacttagctgaggaagtaaaatgcatttccttatcaataattaccacagaaaagcacacttagcttgcatttcaagttgtcttcagtaaagtctcttttgcttgcaatagttgtattctcctgattgctcttctccgacttctgttctctgtaatagagatagatgtgttgtgaagggctacctccaaagtcttgcttttccctttctttgccttgggagcacctggtgggagcaagccttgcaggtgcgggcaatcggtggcgtccatgggcagggtagcagagctcagcactgcagctgggctgagaatggccactcttggtttcttttgcttccacctgggagacttgccctggccttttcctctttaccctttacctggcaaagtaaactttttctcagctgaacgggtgagtgtggtttccaatcctaagatgcagaaggaggccgagtccccgcatcccccaggggccatgcccgcaggtctgttccttcagctttctcctccgtgctggtccgggacccccgcggctcccatgcttctcgcccggtgcctgtgaggcccggatgtgcaggggacggagcccagcgccagcgacctcacccccccggctctccatgtcttttaattccttacatttctaattatgtctgtgctgcattctggctaactttttaaaatctagctttatctcctcttcatctgtatcccatctgtttaactcttccattgaaattatttatctattttatatctagaatttttaattttatctctgaccttacccatttgtcctttacttcttatgtttttataccctctttatttctttaaatattttaaacatatttgttttatattctctacatgaaaattccagtgtctgatgaaggagcgtgcctcattttgctgtgttgtttctgctctcactggggcttgtttcctcgtgggttttgtaattttttttcctgtaagctcatgtccagttgatcttaatttgtgagaatcctttgaaaactgaaggttcatttctctagggaggatttgtgttagtttctgtcaggtgctcctgaggttacaacactatgcagatatggtaaatctgaaactccaaattcaaagatgttcaaacatatgtttgaattctcaggtgacacttctcctttctcacccaaagcccagcctgtgtgggaaataatttttttttaaataatgtattttcttagagatccctgctttgtgcttccaactgctcactttacatgaatccaaggcccccatctcctgtctcttgcatagacttctacacccaaggctttatgtacttgacattggtaatgccctcagggtaggtatagagttcgtgtgtgtgtgtgtgtgtgtgtgtgtgtgtgtgtgtgtgtgtgtgtgtgtgtggcgggggggggtggtgagggggtgcctcagagctcagttagggctctggcttcctccgtcctcttcagtgatccccaaacaatttccttactttcttctgcaagcctgtaaagcattatccctcagtccaattcttgaatttcaaaaccatgtaatcatcctcaaattatttcgccttatatatttttttcaggggtacatttgcattttgttttgtaataattacctatatttgcaaatatttaactgctttcaatgcccacacctgtcattttatgacttgctaattctagagctaattttgcattacttaaaaaactcatagcaccaatttatttttttccttcccctccccctcctcatcctgggtctccgttgctgatgctgggtgcagtggtatgatcatagcttactgcagcctccaactcctgagctcaagtgattctcccacctcagcctcctgggaagttggaacggcaggtgtgagccaccacacccagctaattttttaaactttttgtagagataggttttagctttgttgcccgggctggtctggaactcctggcttcaagcaatcctcctgccttggcctccctaagtgacggaattacaagtgttagccacttcgcccagccacccttttcttatgaaaattaaatgggaggtatattttatgagatctttaagaatctccatctccctcacaaaataaacatttttttaaaaaataaagaaaattggtcaggtgtagtatttttgagttctaaatctatctcctcaataaaaagaaacaactctatggatcacacttcactgttttctgccacttaatgtcaaaattctgggggtggtctgtttctttgaagatattttgtctttctttccaagattcttatggaagttttaactcattcttcataagacctttcccagcatatgtcaagatagatgccagtctctattttcaaaaaaggatgaccatattgtaggaaaaaacatcctttttttagctcaggaatgttttcttgtcttcttcttgtacttttttaaaagaagttttaaaatttttaattggaaaacttactagccaaacgttggtgctctaatttttacctcctatattcttatttatcatttattatatatgttcttttcctctgccttctcagagagcttctcaagtttttattccgttatcactgatttttcctcggtattattctcttctttaatgcctgcttcagaccagtctttatcccaaataggagtgcagttctgctgtactccaagaacatatcacaaagcctagtgcattatcatttgttttgtagccttttaattacctacctagagtgttgtgataattaattttaggattaagaaaagttaagaaatacttagctggaaaatcattatttctggttgtttgtgagggtgtttctggaggagattggcatgtgagttggtggactgaatagggaagacccatccttgatgtggctgagcaccatccaattggctgaaggtccagatagaacaaaaaagacagaggaagggcaaatttgttctcactttcctggagctgggacaccgttcttttgcccttggacatcagaactccaggttctctgactttcagactctaggacttgcaccagcagtcccaggtcctcagacttccagccttggactgataagttacaccattggcgtccttggttctgaggctttcagacttgaacagccacactactggcatccctggttctcctgcttgtagacgacctgtcatgggacttctaagctctacaatcatgtaagccaattgccctaataaatcctctctctctctaatttctctctctttccctcccttcctttctccttccctccctcctgttggttctgtctctctggagaaacctaactactacaaatgtctatgtgggattttagatatttgaggagaaaccagtattttcaaattttccactaaactagcaacaaagacatagaagaacacagtaactcacctcactaaaaacctcaatgtatcctcaatgatagaatttgggaagacttgccaataactaggtcagttgactaggtcaaaaaagaaaaacaggccaggcgcggtggctcacgcctgttaacccaacacttccggaggccgaggtgggtggatcacttgaggtcaggcatttgagaccagcctggccaacatggtgaaaccccatctttactaaaaatacaaaaattagtcaggcatagtggcgggtgcttgtaatcccagctactcgggaggctgaggcacgagaatggcttggacccaggaggtggaggttgcagtgagccgagatagtgtcactgaactccagccttggcaacagagagagactctgtctcaaaagaaaggggggctggaaaaaaaaacaaaaacaaacctccaggtaccacttggggaaaaagtaggcagatattttctatttctctcttgttgttttgtgacttaaaatatataggatctgtaaaatcctgaagatcatgtagctaataacaattaatcttggaagaagaaacactctgaaagtaggtcttcagctgggttgaagaaaaaacactttcttttctgtgagaccttctgacagtttggcctcatcttagaattctttaaagattcctgagtatttctggtggcatagagcaagttagccctgccatgcaggccaagtgagagccttgtgactgttgcctcttgtaataatagcaagttattttgtgtgatatttctcttattacttaaatctctgtaaaatcatgatgaaacatacagctttagtttctgttgtgctgtgcagaattaagcaacaggtgtgtcacacacatggaagggaataagaaaggggagagcagtgttatcttcccaggtcctaagtggagggagcagtggttctcccatgtggagggcagctgtgatctcatgaggatcatgaacacagagaaagccatgtcgggggaagaggaggaaccataatatgagaaacctattcctgggcctatgtgagaaagcaccttagtgaactttcagaaggagcaaagaactctggagaagaaataattttcagctataaatcagggcttgaagccatggcaatttagttattaaaataaatctgacctaaatttgtagtcaaaatctggtgaggacaggatatttgtcttacaacataaaatgtatttctaaaagtgcccaaggccaaaaccttttgttctctgaagtatgtaaaaatattaggctgggcacagtggctcatgcctgtaatcgcagcactttggaggctgaggcaggtggattacttgagcttaggagttcgagaccagcctgggcaacatagtgagacctcatctctgcaaaaagtaaacaaaaaattagccgagtgcagtggcacgtgcttgtagtctcagctacttgggaggctgaggtgggaggatcacttgagcctgggaggctgaggctgcagtgaatgatgactgtgccactgcactccagcctgggtgacagagcaagaccttgtcttaaaacaaatctttttttacatagtcttccttattaatctctttagaaaaatattccttcataaataatgcaatggtaagccagttcaagcctgagtggaaagattacaatttctaaatttgttaagtcctatactaatgaaaacaaaattagggagagtgagcatgtgcacgtaaaattgagcgagcatagccctgggaattttatcaattttggcgggtgttcttcctaatgcagtttataacaacatgagggaagttaaagctataggatgtttgcatcattttcctattaatgtcacttatgtgtatttatactttgtacacatgataaataataaaacaagctatttagtattgagattgctgaataggaagcaaagagacagcctatgtcattgactaagtcacttaacctctcctggccagtttttttgactgcaaaaattagagttggacagggttgcttctaaggccttttccagctttaatattttatggttaaaatagaaactaagacaaataaatgtatgttttcagaaagatcaaaggcataaacatacctcagatttacatctcctaaggggcatcatatacttccttacacatagcaggtagtcaggaaaatatctgttgattacatttaaattttttatgtgattggtttcttaaataagtagatggaatgagttatttcaaaggccttttccaaatgttatcttctgcttaaaatgtaatttaagccacataaatagtgtagttagatcaatgagattttaaattcaagaacagaagtcttatctttgatctatgtattccctttgaagcttcatattttctcccatagcaggtgatcatggaactatctctgattatagttattattatggttatttctttgctcagcttttcaagtagaattgaacatttttttaatatgaaaacactgaactattttcaaaacccattatgaattatataatgtctctccatttcttgctatctaaatgtacgttataagaacaagtgaacaattgggaactgggtacccaagtgagtgaaatattctgttccttagttttccttaatgcgacttttaattagctttcccatgctttagatactaaatttatgaagaataaaagttaaaagccaaatgctaatcttgtatcactgcttgtcttgtatactacttgtcctaggatttctatattacaactaggaagatatgaattaaaaccaccaaagagactataaccataaataacttatgacatatgttccattattaattgaaaactcatagttaataaactttgggaaggaaactttcaggcacatggcatggaatatgaaggtgatgttctttttataaattttaaaggtagcatatattatacaaattactcaagagtttacaagcagaaaaaaaggagaaaaaataaaattcacgcgcaccctatattaacatgtaattcgtagtgaaatgtgtgaaatataaacacatgactttcacttattcattttcactttacgctttttaattgaaattaaattagtcacttaacatacataatgcagtgtttgttttccagtctagtagcttttcagcattcagttttgtggctcatgggaaatgttacttagcatcaagatgtggtttgatgagtgaacaatgtcagtatcaactgtacttaacagaagacagaggggctggggttaatctgcagctaacaacatataaaaataaaaacaaacacagacccacaataacatcaacatgcattattaggcaaagatccaaaattaacccaacccacacagatttcttctaagctgagattacacatggaaacagatactttatcaagatccatagccatagtagtaaggttcatcagggcggaatccatatgctgtggcagggcgtccaagaatgccaactggttggccaaagccatccattccaaggctaaaaaagaaaaaaaagaatgataagctatgtttttcatcacacatccacaatgcagattaagaggcctacatttttataccaccaagattctcttcctagcagggatagtgatttaggtggatatcattaacttttttttttaaggttaatagagccattaaaagtgtatataataaaatacttctaacaatgtgtgttaaaagtatgggaaacctctgtcagtaggtactatttgaaacaaagtggaagaatcaaatcagaaaagttttatttaataaattacttatatatggctcttaagcaaaaatatgaaaagattttacatgctagcaatgatcagtaatatattgctagggaatgataaaaataaaactgtagtaaagtgagttttgctgtttataatgtcttttcatatgaagatacaggactaattccacttttagtaaaaacatgtgtttgagttatatcagtgaactctcatgcagggccaaatcataccataagcctatgattaaaagaacaagataaggaatttgacaaaatttgaaaattagtcagatttgatctgcaaatccttcctctgattcctcaatgcaaacaattacaaaacatatctatttcttttgagtgacagcaagacaattacaaattttggttcaacttattctatgggaataacagaaacccaaagataaccttcagagttgtaaagatagcttgaagtatgttaaacttcatgattattattttaaaaaaattacttgttggtctattaatacattatttagaggaaaatctgttctccaaagtcctttttaaaggtcagggaattatccaacacttaggaaaatgataaagtatttattttgccaggcagaacatggtggccttaacatgctcatgcatagctcatgcagtgaatgctagtgagcttgacttccaatcaatggacaccatttgtaatgcagaaatgtaagctttggaaaaataaaacatatttaaatgatttaagatttaagtttgcactacatgagatggaaagataattttccctcaatagcaaaaactgaatgtgatgaaaaaatatattcacataggcactaactccctgtcacactcagagtgagattaagttgacacactttagaagtaactattaaaatgttaaggttttaaataaatgtgtgaatgcgtgtgtgtgtttgtgtgcacgcgtgcttgtgtgtattaagatggaactaaagagtaaatgtaaagagccaaaatacatataacacatactggtccagtgactctgccctttaggagaatggaagttctgaaatacaagtttcaggttagcatttgtactgagcgattctggacaaaatttgttgttttggggtccttctatataaaaactctgtctatagtttctcaaagttggttgaaatttttaagtctacattttattttgaaatggtaaaaatataggcactttttctaactttgatctcatgggaagagagactaaattttgtgatgaggaaatcaagaggtagcttaaaagatgcttcagaaattagtggaatcagtgaactaagagacactggtatcagcttaaaattagagaagttattgaaaactgttctctgcaagcactaaggctaacaagtaatcatgtatctaaagaactctcaattatataactgttgattacatagcttggatttcaacttgttccttcttcatcttttgcttattacctgtcttcaaccagtccttatcttttttagcaactcctctgaggccaaatagcagtagacttaggttaaactcaagttaatcttatgcttgtttctcaatctaggggctatggcaagatctatttcagtaatatgaaaacaagaggcatatgtgggacagtgaggaaacatgcaaaggcaccttcagagtatctcacagacgacttgttagcaatatcactgtaattctacctaaaagaagatggtcctcagaagggagttcaccagtcattggcacagaacaaggagcgtctcagctacaacgctggttgtagcaacctaggcaattgcgtggtgatctggtaagctataacaccataaggaatatctggcctttttgcagtttggtcctcaatcaggaagggaatttaacattctcagagtctgaggccattctacattcaagttgcaaaattctcccccttttttttatttctacgactaataggcaaactattgatcactgtaatttcccatgtaatttgccaacaggttaaataataaacttagatattacctaatccacctgatggttataactttcattgtacattaacaaatggatttttctttttaaaatatgtcatgcacattgttgataaaaacctgcagtcccaagtcagtgaaagactggcccttgagcactgatgagtctgagtttctgaacctgtaaatctctggtcttgaacagtatggtctttaggttactatggtaaagatctatttatgtagtcagcagttcacccagagacatctgtgtgtattacagtgtagaggatatcatttaatttttcgaatttctatatacaaatatcgttttggaaaaaaggaataaaatttgaaaccaaactctaaaatgatcttttctggaattctccattatgtatcacagatgaacttgctgtttaaagcaaaaaatatttaaaacatttatgatcagtttggagagtactttgacataggtcctaggtccttttgtattatgaaaaatcaactatatctacatacatttttaattaaattcactgtgaaacataacagtttgtttctttaaactctcatttgcttctttctaatatagtgggggaaatcaggctttctaggatgctaaaacctggagacattcttttggaatatgtagacactttacttttttccttgggaaaaggatacagccttgctaatgctgagtttagttcaaaacccggagagttttcctttaaacagaagcagatagattcttcatgtaagttcttgaaagagatagaaactatgaatataaaaaggcaacgttgcaggaaaaattgtgctttcctgatctggaaagacttgacttcaatagtgtgtatcacaggaatttgtatgccctcactaggggccctgagaagcaaggaaaagtaagctgtgacatgccacatctgctcttgccttgtgtggccattttgcttcagataatagtttgaatatgtggctatttataagtatactggaattcaatccaatcttgtagggtgcatgtctctgtatgtacatagtttcttcttgctactcctaacccacataaaatgtggtgtatccctctagactagtatatgcaactattatagtactttttctttataggattacttatttagtgccatttcacctttttccttcgtattcagataacatattttggacctttgaatcaccaaaatagtgtctcttcctgaaaatacataattctggtccaaagaaaatggttattgtttattgtgaaaagataactaggaatgataaggccaaaaagtcaatctgccattaagttttatctcccaagaacaattatttctgggtacctagaaagaaaaatgacaaattctttaaaagagaaaaattatatttaaaacccaacaacaaatagaaaaccatatctagagtgtgtttttttaaataaacaaatttagaaatctaattagcattcagcaagcagaagactgaatttttgctaatatttgcaagacttcaaacacatttgtaatagcaatcattagaattctaaacttgatatgattcagagcaggaacaaagaaatctggaaatgacaagtgatgcttcacatgcagcacattacaagggaatggcagccagtaaagaatctcaggcactcacaggctcttattaaatttctgggccagagttgacattcctgtagaaagagaagaaaaccacctacctctggctgtttgtgaggcttaattagtgcgtatttgtaaagcactttgaaatccttggatgaaaagtgctgcataagtgaaaagtatcattattttattaaaacgagataaaagcaacacaagcctttttcttcttttaaattcctaggtcagcaatatcaatgtagagcaagtaatgaatttattaataaatggctacaaaaagaataaatgcaggccaaattattttttcaaaggctcatggaagtctttgacttgggaacattttaagaaataatattggctacacttttattcacaacatccttgacagggtctatccagctctcttctgaacacctccagaaggaagtgctcactactttgtcaaggcagttcattccatttatggatatgtaaaactgttggaaagttctttattacacagctctaaaatccagttcaactagtcttagaattaccctctgaaaccacacaaggagtccaattcttctttgatatgactgcttcacaacccttgtttattcaagcctcattacatggtctctaatctttaccatctcagttgctctctaaaaccacttccattttctagtgtttgtcttcaaatgaagaagctaaaattaacgtgatacttatgatgtgatctgaaaccagtacagaataaaagatcctatatctgactttacactattgtaggctaaaactgtattaatcttaaacaaaaattttaagaagacattatcacaaagttgcctaatattgactgcttataattgactgtgtatatatgtgtatatatatataacattgagttatatatagttatataatattgagttatagttacatgtaacattaagttttttctgtatatatgtacagttgtgtgtgtacacacacacacacacacacacattcaaaattttacttataactaccatgctaaatttcatctttttagtctgagtctgtctttaggaattctattcttcccaagacaaaatcatttatgactacatatttataaataggcagcagtgatttttcttaacaaaccagtctttgtgatccatcaggtaatattgaaggctggaattcttttggaattgtcaagtgaaagaatttaacatgagctgttataggaagaaactttccaggatattataaaactgtatgaaattacttcttcataattttttggaatagttcattctttttatcaatttctctaatatattgattatagaatcaaaatcagtatgtttatctttctaagtagattgttaattgatcatcagggtaatttcagcttaagtatgatttgtcatgggaaatttaggtctattgtaatagtgactctatataccatttgcccatccatccacctatccaaatagtagaaacatttattgagttcctacaatgtggttaagtatagtttttgaagccaaggaaaaaacatggtgctgggaaggcaataacaaatacgacatagtccttgactataaggattggaggcacctaacatggaagaaatattctgataataacctgatgtcatcctactgtagcatatgtataaattgctacagaagaaaagaggggggataaatatttaatataagagtatattagagacatgtacaaattgctacaggacaatcttggcagctagaaagtcttcatacaaaatactttgattttaatgcatctgttacctcctgacatattttgttattgtatttctttcccattagaaaataaacaccatggagggcaaggagtgttttggccattgctatatccctaggctctagtattgtatctgacatggagtgggcattcaaaaattacatgaattcatgaatgaattagtcttaaaagtcaagtaagatctcacaggcaaagagagacagaattcctgatggtggagcagcctgagcaacagagaggagtggctgacgaagagcaaatggtttgttatggttaaagttttagatttatgatataagcaaatggcaggagataaggctagaaagggaggttaggactagatattgaagcttttcataaacctgctaagaactggtggctactggagagttgtcaatggttgctaagaaagagaatgaccaaattctatgttttaggaagataattgtagtaggaaagggggttgagaggcaaaatcatgaacactgaagaacctattacagctgtccaaatgtgaagtaatgagaacctacagaggggtactggcagaaataacaatgatcaaatatgctacaattcacaacaatgttatcttttctcttttttttttctttgagatggagtcttgctctgttgcccaggctggagtgcagtggcgtgatcttggctcactgcaacctctgccacccaggttcaagcaattctcctgcctcagcctccaaattagctgggattacaggtgtgtgccaccacacccagctaatttttgtatatttagtagagactgggtttcagcatcttggccaggctggtcttgaactcctgacctcatgatccacccattttggcctcccaaagtgctgggattacaggcgtgagccactgtgcccggaccatcttttctcttttaaaatagtttttttaggccagatgctgttgcttatgcctaaaatcccagcactttgggaggctgaggtaggcgggttgcctgagcccaggagttcaagacatggcaaaacctcatttctacaaaaatacagaaaattatgcaggcatggtggtgcacacccatggtcccagctactcatgggtttgaagcaggaggatcacttgagcccaggaggttgaggctgcagtgagccatgaccgccactgcactccagcctgggcaacagagtgagtgagaccctgtctccaaaaaaaaaaaaaaaaaaaaaattaaagttatacctttacgagttggggactgagactaaaggagaagaatttgaaaactggctggaaattttaaaggttatatttcattggaatggagcaaattttgcccccttagtatggggatatgcttcatcaaataactgagatgctgtggtattccatggagatgaaatcagattgtagaagaagcttgcccctatcttctacagggctgaactgttcttggaaaagagaatattttctccttgaaattcttacaataagaagagatgtgcaggttgaacgaaataacgagtataaaacaatacctaacactagtaaaatgatgtactactacatcgagatctaaatgtttgtcatttatagaccaaccactagatggagagcttgtcttaccactgagtatcaggtacttctacaaaatttcaaagcaaggattattaaatttaaacttctcagcacatttaacattcatagaatgtggcatccattgctgtcgcagataattaatgtccagttttatgattatgaaataatttacagctaaatagaaatacctatcagttacatgcaaaaaaagttttgtgaatgttgggtgcctaagaaaatagatcataagaaaagaggttataagaaaagatgctaattgtcttgaacactgaaaaatgtaacatgcatgcatgttaaagtgctattactataacatagcttctaaaatttttcattgaaccaatattaatggcatcttgtttctataaatctatatgtaataaatatatattttaagttgctcaaaggtattactcatttctttggacttgaacttttgtattgttgagaaaataaaatccaagagcatggttaagcagtcttctaatgagtttcaccagcatatatcaagtttagttgtcatttcccatttagttttattcttaatcttttatatgcataattataaattttccttttattacaataaaactaaatggctacagcatcttaaagaatcttattcttaatgaattcaaactagtattttttttcaaaaatcaagggcaaattatatgagtagtgggaggctgtatttaaaatactcatctggagtttattaaaaacattttttgaaggacatctgtcagttctaagggtgaaaaacagcaccttggggaaaaatcctttcaatttagttactacactgagatacttcagataaaaactaatttgtactaatgatgaagggaacgtgtgtaaaatagttgcactgatttattctaaatggtaaagaaattccatttcattgactctcctctaatttcattcaagttatacttttcttatacatctcaatctgttgattaacctgcctccagagtaatattttagtgattatattttaatgtggagatgttatacttggtactttttgatactatatcattgcattaagttttctattcctttttattaatttacttttttattacattttatatagtctaattgagattcttctattaactctaattcttgggcatcctaacactcttgctgttagagcgcttgtcgtgtactgtcatgtactttacaaagctttaaaacaaggcttatcaaatttaaactccatggcatattgaacattgataaaatgggatttccattacattctgatgattctctttcatgatggtcctttttatgttttcattgagatggctgtcctaaaacaatctaaatggcaatttcttgactaaggttccctgaattaagtatacggtgtaaattctgaacccactcatgtgcatgaaacaagcttgtgacttctctttcacatgggtgactatcttcccctacctagggtctttgagcacagacaggttttggccacttctctgggctggtgaattaacatcatttagtcctcttttcaactgatgagaaaaaattgaaattccaggctttatttagagaattcagttccatcttcctttaccaaataactcgtacctagttcaatattccggttggtgtttttttgtcattggggtattccctatctttcttatgaacttagtcatataaatttctgttacatttttgtccaccatttacatattatctgcataggagtggtcccttccaaattagctcagtctatcatcttgctggaagtccttttcattttattattacttcttttttttttttttttttttttgaggtggagtttcactcttcttgcccaggctagagcgcaatggtgcaatcctggctcactgcaacctccacctcctgggttcaagtgactctcctgccttagcctcccaagtagctgggattacaggcccgtgccacaatgcctggctaatttttgtatttttagtagagatggggttttgccacgttgtccaggctagtctcgaactcctgaactcaggtgatccgcctgcctcagcctcccaaaatgctgagattacaggcgtaagccaccgtgtctgacccattttattattatttatctgcatattcaaggaaaaaaatataaattttagattcctctggctcataataggctttcttgaagagaaaaatgacgtgcaagaaataactggagccattaaaatatattttatttttccttatttgtagttattaacagaaaaaatgctctaataggtacctaatggaagttgtcagatgtgattatcaagttgaaatgaatatttactcaaacctataaaggtctttggctttttctggcaatattttaatgaaggtatgccatctagtcatctttaacttacatttcttccattaagcacaaggacttcttgaaattggcagttctatactatcaagcaatgcttcatttcataccaccaaatgttaagggaacttgctgagcggcttaaataacccctaggtcaataaactgagtcattagcacgtcctttaaataattgtttgtctgttactggttcaacatttatataatctgtcataataccttggttttttaaggtacaaaaattactgctataggtttaaactagagaatatcatgtaagtagcaatgttttttcagcgacagtttaactatactgtctggtactgagtgagttaaagcctgaacaccacaactaattactatgtaatgctaaccttagttgctggttcattttgagactctttaaaatatgaactgtgtattttacccctatgcactctcttaatgatttgtttttttagactgaaatcacttccagccatcagttatacttttggtctctacatatgcacttctccaagcacaaatatttctttttcctattggtctgccagccctgtcagagcaaatttcactttaaactaaatgctatgatacttaaaacctcttggattactcaggctgctagtgtgatctgtaaccttccaagaatgacagctaaactttccaatttgcttatactgtttggggaactagaaagcacatgccaaaaggaaaatgtttctgatgttgaacagagaggaaagttcttgttggaggtgggggcaagagactattaagtactgaaaaatactaataagaaatgaaaataaactaaacatgctgtaaagtctaagaccttaaacataattcaaaagttaatactagtactaaaaactctggctaaactggttaaaatatgaaaaataacctttagttactgtagtttaagtgccaaccagaatcttaaagtgataatgcactattgaaatgaacaaattcaaaaaatggaatataaaattatcacaagtgctacacaaaatgggctatatcaactccccatctttctttataaaacagacaagtctgacatatgaacaaaaatcaaagagttaatacagccatctaacatgcatgctacccccacggacataatactagtctctcttatatgaataaaaaacactactgacataacaccagacttttttttttttttaattaatgttaagtttttttttttgttaaaactcatgtctccaaagtccttaaacaaatcattcagtttgggaacattttggaatagtttagaaacttttcactttaaggaagcagacaaatgtttgtcttaaaaaaatcctgaaaatcttatcaaatgtaagatgcttaatataaaatctcctatttatttcataatctacttattcatttgtgtcaatattttttagtctaaaataatagtcaaattacatttggatgataaaaatcgagcaatgactgataaagatgtttctggaaagctaaatcaaactaacctttttgcaaaattgagggcaaacatatagataatagaaattatatttaaacacattaaaagtgcatctttttaaacagctaagcatgataacttaaaaaatttgattctaaacttataaatgcaaatatatacacacacataaaggcatttccttgctttgtatggatatttcaaaagatttatagtgggcagtattatttgatgttttgcagccattagttcagtaatttcagtaataaatacaggtcagaaaaatatttcacagttatttaatgtcctctagaacatttaggatctcagaatactgtataatataccagaaatgtattagaagaacaggaattaaagtaaatctctactattataagctttcttggtccttaagactatatttaactgttacattatgggtttcttttttaaaaaaggtaaattcattttctgctcaggtataagactatagattataagattacatgtcttttgatgatgaagcatggtatttctatatcatcttcaaagaatagggctaagcatcctttggtcacactttgcattgacataaacaaattcagtgtagactggaatgtagaaatatatgacaattgtttatctgacttgtaagagtcatattttaagttaaaattattcttaaatcagcctaaggaaacactatcttttttcttctttgtcactcatgtacatcagcatttcccctcttaatttaaggactagcaattaagtttatgaaattcacccaaactaacttaagtacaaactatgaacttatcaataactcctaaattttcttaaagttagtagggtgcaattacttcaaaactagaatatctgaatgggatttgtgtctctactgatgtaacttttttcagtctatatctgtaactaactttgacatgacttctttctttgtaaaataagaataatggctatatcttttaatatctctatgccttgagattattgtatttccaagaaaagtacccgcatatagtatgtatttggtggtgttattgttatgacatatgaaaatgatgaatacttccctagaaatgcttaggaaattctggcttctgcctaatgatctagacagttaagggatactctatcatacttggcatgcttcatacacatgctttctgttttgcctttatagggctcctacataattcatagagatttatgcctccacataaacatactaattgttgttgcactaaaataatgccgtggccaatcgttctttccttttaccgtagtgagactgaactgtttgtataaataaggttattcaatcaaaaccctttagattttatgtcatgattgatgaaaataacaacacctttagggatgaaacttactgacagattctagttacatgctttttcatcttatttgatactcagtgagtttattttcaaagtagtaaatcaagggtaaggtttttagttatctcatgcaaatcatcacttcccacattgtacgcattcctatactcaggtttactgccagtgttggcttctcttagaaaagtgcacacaggtcatgaaaacgtttagggtggagtattttcattctgcgatgtgtgttgtctttgggtttgtgccaacctgacaatctggcacttataagcaaagctgggcaactatgagaattctttaaggagatggaatgcaccatacatttttgagattatctgggttttagacagtattctgaatgaacatataggtatatctatatttgttatttcaagtatgcaggaacagggacaaattgattcaatttaaaataactatggtatctacttgctgatggcaaacagtatctcccttccccagagtttgttgggggataaggtaacatgcaactgcataaaattgtaatagtttctttttccccatagtgtataaaaagaatgaggtaaattataatagcctaatatatatgaaggctttgaaaacatttttaaaaatactttaaaaaatatttgaatgctttttaaaaatacttttttgagattttttacaactcttaaaatgctttttaaaaatacttattaatgcattttacaatgttttataaaaatattttttgacttttaagagctcttgcatatttatcacctcaaaaaatatctcagcatgaagtttgggcacctatatcaatatagctttataggtttttttgtataaatttgaaaagatgtaaattttaagctacagttgcattttaaaaatttacttgcctaactatgttcatagaagcctcctcccatcctttcatatttgaggggctctaaattagccacttgatactgtctacacaaatctggattcctttttaagatcgctttgccttttagtttctgacagcccagtaggaaggtgctgtttttggctggaaaaccctgaaaaagcagggtgtatcaactttagatatagtttcttctaaagctaaacaaagaaaacaggcttaatatatataagatacattgtatttcataaaatataatgttgacttatgttcataaaaagagaacatattcaggaaattatgttcctgtttaagtgtattcaaaagactatttaaaatctttagcttattcaaagggtgcaagacagcatttgttaattctgcctttctactctaaaatgagaccatagaaatatgtagcttttacttaagaatcaagataaatacacacagattttacatatacccataattaactttaatattagaaaaatgattagaaaattactaataattacgtttaaatacaaaacaaagcagtatttgaaaataaattatatgacagagtcccatacttgtctctttggagcaggtctgagttctatctaattcatggaggaactgagcagttagattaccaactaatttgggctaatattggaagattgtgtgttagcctaaaattcctacaggtaaattctataagattatagctcataattaatcctttaactccagacatcgcctccattttcaaatgaccactttttaaaaattagaaaacctgatgcattttaacaaatcctttataatttaaaactcttccaatgaaaagtgttaaaaattcatcaatagctatgatgtcagtgttaaaagaagttcaaagcctaaaatgttttgtctcttgttcccttggaacattttacatttctatgtaaaatgaaaagtcagttttaactcagtaaaactttcacccatgagatgggagtcatagaaaatcaacatttatataaagctccttgataaaatggttctccccaaacctgtaattattcaaattacattttttaggactctgatgtgtttctaaagaggcaatatctctattacaaagacacaaaaagctgctgtttcgactaatccttccaaactacttattgttttaaagaagtaattaaacactagtgaattgtcagaccatcaaagtacgatgttttatgaaatagcatatataatttaaaaagttgtatttcaaaaataatgtggttctttgtcaaatattgtactgcttagcttagagtgctataaaatctgaacctacttactttttttctaagaaaattcacattctctaaattttgtgtgtgtgtataagaagatactaaaggtctgtgtttttgtactagaagtaagtcaatgaatgacacactccacatagcatgctctttacaaaaaatgagggggagtattatttaagataatgtggcattcttttctaaatatcattaattctgtttcctcttaaaattaaggagaattcagaaatgtttaagatgtttattctgctggaaatatttccaatagacaaatattatttattctatttacactagaataaacatcttaaacatctgagttctccttaatttttagaggaatatatattatatatatatatattactcaacatattggagtaacataaaagtgggcagaaacaggtaaaagaccattgatgtccagatactgacaatgtagtattacttttataagcctgataatactattacccttaaatattttcaaaacagaaagctgaaagaataataaagagaatgctttaactcatctcaaaaaattatatttttaaccctgaactatataagcctcttaaagagaatgagattatttcttaccgacctccatatccctagacctcatccaagtgcttgtcaactaaaaaggttatgaataaaggaaattttaagtgttaaaagcaaacattaaatgattctatattttatcctatattttgtgctttataaagttaatttcacctgtcatcacagaaactttaagtaaaattataagtatcttttggaaagagcagcaataacaacataaaaatcccaacagtatatatgctatttttatcatttattgactactaacagaccattagttataacctggtaataggaaagaaacatgaacaaggaaactctattcattttaagtatggagtagtatttgttgctacagaacttaagctattggactatgaaaactaatacagatttttaaaatattctgattatcctctaaagatactctaaaaatacaaccaactaaagatataactttaagatacaagtctaaagatacaactttaagatcctccaaagatacaaccaactttaagatcctctaaagtcataaccatcttctaaagttacaccatcctctaaagatacagcagtaaaaattcttaatacaaatactccctgatgtttaaacatggagccattcctccaggtgcaacacaaaatttacaacaaatcagcaatgaaattgactataactgaaattatgtgacttccaagcatgttttctactgatctttctccatgaaaaatataactccaagaaaataattattttgcaattctagtcagttggttattgctattattaatgagatattgaatactaatcatattatttcttcctctgttatggtgaacctataatgtttctttaggctagattaaagtagatggactagaaatatgattttacacacttgtaatattgggacattataagagttgcttttgaaaataaaataaaatttttctatgatagagactgtgcttagatgggtgtttctcagtatatttaattagacttgtagtagtataatacaagtacactacgaatcccttaactggatcttaattatgaaggcaagcatcttcatctatgtaaaatatagctacttaaggtctgtttttatcttacctaggttattaaaaaattttcccatatagcataggctcctatcaacaattttataatacaaagcatatgatactataagcaggatatataatacacatctatttgattatatatttaatagatggtatgcattgtacatttgaaaggatactgaaatagtaaaaattaaaattaagaaattataaaaaagttcacattgaaaatgaaacagcatgggaaatggagtaagacatctatgtctgaatactggctctgacctttaaaacttctattaaacaaacgtctattgagaacctagtggtgccagtagatagaactttgaaaaagacagtcaaagttcttgcccatctagagactgtattcttgtggtaggagggagaataaacaagtgaacaaaaattaaattactaggttagatgagggagaagcagcttctttgataattctcttaggaaaagattctctgaagaaggaatatttgaactgagacttgaaaggtaagaagaagccagttatttaaaaagtcaaaagactattccagttaagcacaaaggtgacaaagtgcgaaagaacttggtgaatgtctggggaagagaagggagtccagagtgggtagaattaacaagcaattataactggaatatttgatgaggctggagatgtagataagtgtcaaataatgaaggactttatagaacatggtaagaaatttgtattttattacaggagtatgggaagccattgaaggcacgtgagagacgtgatatgacatacttgaaaaagatcattatggctactgtggaaaaaatgaagcagaagggaagtgcagaaacaggaaaattaattaggctattgagtggttcaggtggcagatgatggtggcatggaatagggtactaacagtgaaaatggaaataaatagccaaatttcagatctattccagaaatgaaatgaaaacaacagggcatgcagatggtttgcagtggagagagagggtaatggtgaagaaaagggagataataaggaagattccaaagtttaaagcttgaactactaggtgggatggtggtgacacatactgagacgagaagattaagggaggaacctgtttatatgtgagaaatcaaaagttaagtttgataattttattaaacattcaatttgatagcataaggaataaggatggtgctgagaggacaagtctaagctaaaaatataggtttacaaatggtacttaaagccatggatctggatgtaatcctaggtgtggtgggtgcagttagaaaagagggtcccccaaaacagggtatggatagagaacagggatatagccctgaagtaaccagcatttaaatgtggaaaagagaaggaatggccagcaaagaacattgggaagaaatgacaaagggcttaggaggaaaatcagaaaaatggggtatcttgagagctgaaagaagggagtttcaaaaagcagggcctggtcaactgtgtcaaaaccagctgagaggtaaagatgagaatggtccattagatttggcaatatgaagactattggtgattttgacaagagtggggaagttgaagagcacatgcaagtcttttgagaagttttggataaagggaattgagaaacaggaagcagttggaatatgatgtggggccaaagagtttaactttgcagattctgatttatgtttatatgttgacaggaatgatccagtaaaggggaaaagagtgacaacataaaagaagtccttgaaaagacaagaatggggtctagagtaaaaatgggtttattggattttgaaaaaacttctttcattgtaatagaagaaaggtgggcaaaggtaagaatagtttattgattgagtggtggcaagataacctggggtaagttgcttaaacctacatgcttcagttttcttaataatagtgtctcccttcttcagctgttgtgaagagtaaattagataagggatgtaataaatagcaattcataaactgcctggaactcactaaatatatttcaataattgccatcatcattattggtccatctatctcatattgtacatagatctgaaaccatttagagcagcagccccgaacctttttggcaccaggtactggttgtgtggaagaatttttccatacatgggggaggagagacgattttgggatgaaactgttccacctcagatcatcaagcattagttagatcctcataaggagcacacaacatagatccctagcatgcagagttcacaatagggtttgtgcgcctataagaatctaatgccgctgctcatgcaacaggaggtggagcttaggcagtaaggtttgctggcctgctactcacctcctgctgtgtggccaagttcccaacaggccatggacaggtactggcctgggagttggggacccctgatttagagaataccatttaaaataatacaattagaataaagattgtgtatgtcactgaagtcagcattgtttctactcctttccagcagtttcatttaaaactctactggactgttcatgtccccaaaacaaattcttttgagcagttgcacttgtttaagaattatgtgtgtgtgtgtgtgtgtgtgtgtgtgtgtgtgtgtgtgtgtttaaagacaacaaaaactgaagaaaacaatgtttacttcatgaagaaactttctgtggacttgcaaggttagaattttgggcagatttaaagttgcaaagaaacgaagaagcaaactatagaaaaggccctcagataaagtctaaaattctgttttcatcttcatctttttttcacatgcaaactattatgttacaatttaagtagacataggtctatttgaaaacaattctaagagtataagctacattttgaaagttcaacattctaacattatacctaataccttctgaaaaggccctgtgagtgctgcacctctttcctttaaaatgttcaaaccactcctcttaccctcctcttgtattggggtaactaacaacaggcatttccccaaaagtggatcctctttttatcaggagatctgactttactgtccccaattcagaaacagtcttctgagttctcaatacacttttggttattgcttttatggtagttgtctaaatcaataaatattacatattttttctttatctcaacattttgatttttatgaggatgagaataattttttctgtgaaattagatggctaaacagtaactgtgacttcaatcttctgggaaaatataagctgatttccttttttgatttattttataaaatttcatatttccatatataaatttgacctaatataaatatacaataaaatatatttatcaatgactatcacccaagatggccccctgagggtgaatttcttgacaaagaagttgctaacttccagttgccaaccacaaaaacaaagcagtagaaaagataagaggtgtaagtaaaaaatatatttaacctgtattaactgaatcaggtaattaatgcctcaattgagaggtttcattgtaacaaaaaagaaaataaatatgattctttatgtactttactatgaggatgcacatattaatgtataaaattcagcttgcttaaatgtgattttgaaattctattgatttattcaacatattcatagtatttcctttatgtttgtaaggacccatttgataagatggtatagtgtgtgttaacaacaatgttatttttactctaagaagagctcttataaagtgaaacttcaattttttgaaatccttgaaattcccttaaatttccttaagtactgtggtgtcttctctataatgaaaactgaaaaataatgttatgactcattaaataaactcagtaagtacaaacttatgttgaaactaaacatacaaaataactaaagaaataacaaaccattttattttatttgaggagaaaaaagaaaaaaaggcttggtctttaaaaaggattaaaataaactcaatttatggagtcttggaatcttcacggcagtgcagacggacttccacttgccctcccctggcccacctcctgcacaccttctcctcttagtttattcacattttaaatctttcttccaagtttggcctgcaaccacttgactggataaagtaggtcacttgaaaaggaagaaagcccaataaaatgaattgcaaagaaaacaagattaaactgattgtgctgttttcatacattgtagctgaaattctgcaaatatgcagttggctgtggtttggcattcaacagaatgtgatcagtaaggaggaaattttattctcattaactgctgcagatttactgcagtgaaaaagggctatgtaacccaagatgtgacagtacagaaagatcaaagccatggactggaaactaaataaaccctctggctacttcctgcaaggaaaattcactttggcaatgtagaacagagcccagttaaaaactactctcagttttatgagctgtcatagcagttcaagtggtttggactggctgagtttataacattatatttccttgtttttgtcttagatacttccgtaagcagttttaaagacgcccccccccacccctttaaaaaacacaacaacaaaaaactaatttcttttgattgaaaccaagaaggtaaccactaaacttattaacgcaggtaggtcttcatttgcagattcctttctcatttaatacagcttaatattttattcttagatttatttggtaatataaatttacttaataattcatctacaatctgtataattcctattcagaataagtgcaaatcagtttacagagcccatatggctcatatctgaggagtaagctatttgtaatagcacatctgtaaagactatgggcaatatggagattatgggaattaatattacatttaaaattacatttgaaaacctgtaggccctaggttttagctgtttcttaaaaaacaaatatcttagaaaaaatatctaatatttctaatataagaaatctaacaactgttcataaatagttaaattacattgttaaatcaatcaagacaacaataggctagattaaatctaccttaaattagaaaatatccctgagttaaggagtaagctcaatatcattacactcatatttaaaggaaataaaagatgacatgctctatttctctcccttatttttttaagggggaatagtgatgcttattaaccaattatatacaattttgttattctcattataatatgaaggagcaagcctttatgacggtaatttgcattatattaccttaaaaatcatttttgttttttacaataagagcatttctaggtcaaatatgtcataagaaccgtcatccttgcttaaagactttctttctttccatttaaatttacaactaatttctatctgtaaagccaacaaaaatgcaatacatgtgaaaagtatatgacgtttaacactagataatcactcttaaatggtgatgatataattaacttgccagacacaactggattggcttctgtgtcattttttctagtacaaagctgtaccataattgacatgttaacatttttaaaggttccagtcatattcgggttacgttttaaatttatagactcaattatgctgaatttcttctactaagtcaaagtcctaatgtcacaggatccttggggtgttgctttgccacccagaaaccattgtggctggcggcaccttctccctgagtattgtttgcgcccgctgggctcgttctgcccactaggcccgataggctgtgctcagcttgagctaccaacctggatcccacacctgccaagggttagccaggtgtggagcggcgaggttgtgtgggtgaccaagcgcagggtctggtcaccacgcacagcaggcatgctggctgactggctactatggcagggtggttagctccaggcactggtacaggtgctggctctgtgtgaggctgcagatggaccagatgtaccgcacgcagcttctgctctgagcaactgcgtctggatgagggaaacacagaggcgcccagaaacctggagaaactgggaaccgcagagccccacagagggtgtcacatccctggctcaggagcaactacgtctgggctcttggaagagccacagctcttccctccttctcgtttcccacaacatggtgagtgggggcgacgtgtttcagccccgtttgtgttacagctctttgagtcctgccattcaggtcccaggttcttgtttcccatccaggaagaatgaggttaagtggacaactggagggtaagcaaaggggaagaggagctccattgagtgacagaacagctctcaggagacccaaagtagtagctcctttctgcaggcggcctgatgagtgtccagctctcagcagagaggagatctgcagtgggtagctccttacagcaagcaggtaatccccacgtctgtatgagtctggctgagcctggggtttttctaggctcagaagggaggaagtgcatgctgattggtccatggctggccatggacagggccagaaaaagtacaagttctcactttgggtgggagactccacctggaaccggcagcctggtccccaggctcaggccatccctggttagaaggtggggtttcactggggattcactcctttttgcccaggagcctgcctgttgccatcaacatgccatccagggtgcccaggcagcccatactaagccaccttcagcaccccctggcctccctccctgagcttgtaggtgcccaaagcttcagagggggctgaggcagtggggggcgggggggggctggtgtgtcagtaccgccccaagtgcaggcacacccagccaggtcatgacagtgcctgggcttggcttcaactttgctgcaaaattggagcaggcaccggcaacagggagaggccagggagtggaagcaggcacttccgaacctgcaggggcagggggccttccccaggcccccaagagcacagggatgacctggtctcaagctgtggctgggcggctgcagctgtgcccaggagtgtggggctcctggcctgccaacttggcagggggcagggctcatgcctcttcccagcctgacagctctgtgtagctcacagtgtcagctgcgcctccccaactgcagctggcatccctgcagcagctgctccagatgggccactgctgccatcactaataaagttacaataaatttggttttatttgggagcatctttgggctttctatacagctaatgtgcatgccttcaaaatttttgctcagattagcagatttaaattgaacactaacttgaagagggtagttctgtcacaacttctcttgtttctaaagtttcaaaagaaagcgaatcacttgaaatattttttcaactcaggactataatttctctaggataaaacatcttcccaagtttccaggattctaagccttgatttgtggctcatatgtctatatttcagttaagtttacaatttactaatgccgatgtgtgataatctaataaaatctgcccttaaaggttataggcccaatttactaataaaacctaattcaattctccttgggaaatgcaaatcattagtgtccaagcagcagaactgaatttccttgccttttctatattagaaagaagctgtctctctaagaagtctaaacaaataagagaaatcagactattaataagcccatgaggattcatttatgagcatttttaaaacaaatgaattttgcattttaaaacaatgcaaaaatttaaactggttaattagctgaataaatgatttttaagaggcatttacccttctagactgagaatatcccacttatttcattcccattttttatacaactggatttaatctgtagagaatttagtgaactaactaaagataatttaaaggtagtgaactaattacttaatgtattaataaacccttagctgcttgcttccaagcaaatctgaatcaccagtttgcagtaaaccatgtcaaatgtattaaatcaaactgggtaaacagtatgtcatgttgcacaacaaaacctacatatcttactctgaattttaataacatttattttaaactttctaaagtacagttcactgataagactaatatatctgcttgtcatctggaggcaataatgatgtaatagtaggagtgttggctcttaccaagcttaaaggcttcactattagctacctggttttaggctagttccttaaaaatatctgaaccttaattttcacattgtgaaaatagggacaatattactccttgccctataacctcacacactttttaatgatcaaataagatacatgaagatttaaatgcaagataaatgtaacttattagacttcatatacttagatttagagtaaaaaggcttaaacattttattctttgaatcttttagaaggctcctaaggtattccaccttcttaactaaaaaagtaattgggacagctactatgaaagtacacagaaagaaaaaagggatttcatgtaaagattatgtaagatcaagactcttatactataaaaattttttatttgctttgattttttcctcattaattagaactatgttatgacatagctattgcactcttgttctcctgtttttaccatcccacaagtttaagagtaaaatgaccactgcattatcttaggaataattttacttgtcatatagtactatttcttatggttttactcaaaaaattttactgtacacttctgcttcattaatactgaagaaggtggaaagaacttaaaattatttctattggtcttacctacctatgtcatttattacttggcttgaaatagatgtttacatatattgaaaataatgtcatttggataactgaatacaattataacaaaaatttgcacagatctgagtatttttagatcaaatcatataccatgcccgaatcagagcaacttttaaaagtaaacaggacactgtattattatccaaccttactgttgctataaagaggttctactgcgtatgtttaaatcatgacttaaaattctatttaaattgagaagcaacccttgcaaatatcccaacctggatccagctaagaacaagtattagggacttatgcaaatgtgcatgtcaagaacaaagtgtaaataaaatgtatgacagtgacttgcattcaatgatatttttttaatattatactatgtttcataatagacttatcttaaaatatgtttacatattaagagtaagtcaacaaatctgttataatgttttaatacatgaaaatcaatataaatggattgagcaaatattcttaaccatactgtctgctatctgttactagaattacagatgtggcagtgatgtatccaattttatgctatcaaaacatcatatatgaataaaatttttataaaaaacatttttaataaggaagaggaaaattaaaagttcactgtggtaaatcatttaaaaagtgaagaagtttatgaaaggtggatattcattagtaaatgtatctattttgacttattttaacattcacatataaagtttacttagagaaccagtgtaatataatctagtatgtagacaaaaatctcatggcacaaaaataacgttgtaaaaatgtttattccactaccctcaatgtatcaattttctttgacacataataacttatttatcagtctttatgtttatctctgattatttcatatggacaaattcttagaaataaagttatagagtaaaaggaagtaaacaatctaaggctcttgttctttattaccaaatgcctttcataaaggttttattaaattctacaacaggtgtttaggagtgctgttttgctttgatgtgtgggtattagcactagaaattatttggcaattgataggtgaaaatgttatgtctgctttattttgtaaacaccatgtctagaaaaatggctaagtcagtttttttgaaaggcttcatgaagcatgttttctgctgagaaaaagtaatatgaaattcataaataatagaaaaactatgatcatctttggtaaaaaaaagtaataacacactaaatgaagcagtattttagtcaatgattattttaaaaagattttataggtttttagcaattaggttagttcttacaatgctgaacaaatggttggtgtcaatgtctatcaaagaaaatgcttctgagaggttcttttcacttttttgatccttccatctaattgctatgctatggccacagtaatgaagatcattgaacttaaattattagaacaaatgagtttgggttattaattaaaaattgataaaggacttatcaaagaaggaattttgcaggcatatttactttcctctcaatataaaagaattttttgcttggccaaattaagggctgtaaaatagacaacttagtttctcttctgaataactgctttgaaacaaactcataatatacagttctagtaatatgtagttctgtaaacactgcacaatgccttttagacagagaatatgtaattttgaggttgctttctcaagggaaaaaaacagtaaactaaatagctgagtataattaaggcagccttacagctaaacaaataagtctaatttttttatatgtagaattctagaattaaaaaatcatacatttaaaaatttgggtaaaagattatttcttatattttaaagaaataattttttagttctcctcagtatgatttttaaaagtacaactaatatccaactgtgatttaatatttgaaaaaaaagagaccaaaatagaaggcatatgtatatgtaatatataatacatataatgcataaaaaagttaatattaaagtactctaagaaaagaaaaagaggcaggctataacacacacatagaaaatgaaagtttaagagtcagatggctcagataatgcatacatctagtttgtctttgaccccactgaaatggtcagtaaatgacatcactgtgccaaccacaaagaagaactccaggctctctgaaaaatatttttcaaagccccaaggaaacctaagcagtctctgcaattttttttccagtttatgaaaattggattcctataaaagaaaaatggaccatttttactgcaacaaaaactgatttgtaaaagctggaagcagtttaaaaatacccttaacatgcggttcttgttagtcttgaaaagtaaaagttataataaaaaaatggtccaaaaatatggtgcagatacatggtatacataactggaaaaaagctagtcttgctcctattatttttaattagcttcaaaagcaagttccactttactttctaacaccagttcagattttgggaggggaagatttacatttgacgctctgggattggcaactccatagctattgccttagagccctaatgcattttgcattagctctaaatgttgggaaatcctggcgccaagaggttcaaactgatagtgacacatgtctaaaacccaggattcactgtccaactgccaatatctattttatcaaacatccagtcttcttatagaatgggatagatgagtttaacagttttcactgtttccaattaaactgcattgctatcttacaaaaatgaaggtattcagattaagaaggaccccctgacttggattttaagaaaaataccaatttcaactatttaaattcttctctaaatctggcttagtttctcagattttaatacattcatcctattactgaaccttgtcattttatgaagaaataaataatttttctttaaacaattaaaaaaacccttgtgtcatacaaattagcaatttgttatttattacatgaatccactcaaactgaaacattaagaaaacagagaatgaaaagccatgagaactggctgaagagtatgccacttggcactgtcatattgtttcgtgttttatcccacatattgttatacttaaatcattgaaaacaatggtaatgataaaagttcaccttttatacattaatcaagtattactctttctccagataacttgacagtgtttatttatcaaagacatatgaagaagaagcagggaaagaatttataaatcatctggaccatttccctgatttaaaggaaaaacacccaacaactccaaatagacaatttaatctttttaagatatttagagaatcagctttttcaatatgtaaagatcaattcagctattattctttcacagttaacacaaattcttcatgttgtccattaagtctgcttattctcatctttacagtagagatgaagaatgagttcaacaacttctctttaattaacttgcatttcttgaaaaagattcctactttgcttaaaatcggttaaaattaaaaatttcaaaaatatttttgaatgactattatttagtttaatgagatttaaattcacctataggatatcaggagctgaaatgtagccatagtttaaaatttcacattatgcagcaaaattatcatattgaaatatatgaataattatgtaacaatttaaaatacttaaatctttgaattgaaaaatatgccacactttcagatccatggatactgttaaaaaagagcttagaggtcctattaaaaggagaatcttacccaccacaaatgattgaataaaagcaaaaaagcaaatgattccagagtaagtcagtaaaacaaagtgtgaaaaagaagactatgaatctttggctatattgtgtaatccgtctgtggctctgctgatacagtttagggtcccttttcatttgttctattacctaccacaaaatttgaggaaattcattgtgaattatttcttctaaacatgaaaaaagtgatacagttaaatgtgattgaaggccttaaaaattacaaaagacaagagatgaaagtcttaactttctcagggaaagttctttctaaagggcaaacaattctcaaatgaaaataattataaaattgtatcattcttttgatttgaaaaacagtctatagtaagttttattaactaatcttttaagtcaatattactgggatatgtcttttgtgaagtaaaagaagctacttacatatttttacttttgaaaagaaagtaaaggtacaaaggtaaaaggattttcccaaagtcatgtaaaaaaatcttattaacagaatggaggaataaaatgctgaaatctttggacccagtacataacttgtggaatacatttatctctctcaaaacttttattagtttataaagtaatcatttttgagcactagaaattagagattttgctgaattgagcaaaaaaggattttctgtattttagtgaaaatgtttagttttttaaaagtcacataattaaatttaaaaaaagcaagtctttctcaaataagtaatgcatgatttatagcagttggttttctttagattcacagtatctgcaggagatacaaaaataatgttttgctaaaagtaaaacataaatggcagaataattaatcttataaatgctataagcaaaatttttcaatataaatattaagatcacatatctaaatcatttcatcctttcccaattatgtttcagaaaacatttgtacagtgaattgtcacctgatagagtacagtatttataatgattaaacagagcctctatttaaataactatagctaataaagccagaagcatcagaagtaatcaaaagccatatgctttctagtatttaaccatgtttagcttttatttcctaaggcaaggtgtttcttactatgacaatctagtacacagatgaaacaatttttaaagggctactatttatttaaagtacactacagaacactgaactacacaaaaggttattacatttcatgtaatactcctatgattttccaccatgcttttaaactttgggtcatgaccatcagcaagttgtaaaatcaatttagtgagttgcagtttgcatttaaaacaggaagtggaatataataaaatataattgtgtattacaggtagagtaccattttaagaaatttttgttttacacatatatataggtagataaatatatgtaaacagtttacatatatatgtataggtagatacatgtatataaacaaatatgtatgtatgcattaagttcaaatatgaaaggtatttcttttaatgtgggttgtgatcaaaaaagctgaaaaatcactacagtatattttgtgtcctccaaatgaggcagcatgttatactggaaagaacataaactttggtgatatatacacctgagttcaaattgttgctccatcatcctacttgtgtgaattggttagttaaccttgaatttttagagctgtgatttcatcagtaaaacatataataatacttgttttaaaatgttgctgtgcaagttaaaatatatacgatgaatatttgtaaaacagattatatacaatggataatccataatggctgaaattataattagtattaaattaaaataacgctacaagtgatcattaagagttatcgcacattggtcacaactgtattgttcatttaaaaaatacgtgaacatatcttacacatagaaaatagcttatcctaatgaaaagtagaatttaagaagaaaaaaattaataatttaatgaaaaaattactaggcttaagggaaaataacactataactgttcactggactagcttaatgtgaaatgtcaacggtcagccttaattaaaatgttacacctctaggaatgatatgaagagaaaaatattgtttatactttctggcgagattttaaaaatctattatattattatgtaataaagctggatatatgctgtggggaactttattataattgcaaaacaatactggcctgactttttttttctcttaattattttaataaaatgccatctagggaggaaaagtcttcaatttaataaaagcaccaactttttaaaaacagctatgtcttgggtaattgttaaaatacacatcttctgttctcattttatattttaatggctttggaaaacactcagaaacaatctgcattcattaattaggcaaaagtattgtttgtgtcaacagacaatctatattttccaacttgaagagcatattttgttttagatctgtgatccccattttttttttgagacgagtctcgctctgtcacccaggctggagtgcagtggcgtgatctcggctcactgtaagctccgcctcccgggttcacgccattctcccgcctcagcctcctgagtagctgggactacaggagcccaccaccacacccggctaattttttgtacttttagtagagacggggtttcaccgcgttagccaggatggtctcgatctcctgacctcgtgatctgcctgcctcggcctcccaaagtgctgggattacaggcgtgagccaccacacgcggccttgtgatctccattttttaaatacagaaaatgtgacttcataagttaatttaaaatcaaacaaacatgcccttgaaaagattgagggttttttcccccctcttaatgaaaaagaagagaaatggagagtgaagaggattttagctttccaaaagcaacagatactacacattagatttttcttggaaaactgtttacctgccaggaaatgaatgctgcccaacaacatctccattttgaaggtggtaatcattgaagaaatcgggacttatggctccttcagaggcaattaatccatctagaaagaaaaaaaaatggtaaccagtaaaacatatgtgtaggaaaaacctgtctatcaagcaatacaataagaaaataacttgtatatttaatctataaagaaaaatgttagcatgacatgctgttctctctgggagtatgaacagacaactgtatgtaccttaagtactggttcacaataatgcagcacaacaactgaacattcattgagcatctactatgtatttggcactatgtgagtacagagaggaattagtctctgccttcaagcaggcttatggtctcgtatggagaagaaagaaaaagataaggaagggaagcaaggtggggacagacagtaaggatggttcaggctaaggaaatagaacaaataaaggcaaggaggtattaaatagtttggtattggtaaagggtaatactttattgtatttcacagctttattagtgtagcatgattagggaatcagatataccaaataaaataagtgaatttctaaataagcaatatttgacagtttaagtgccagacattaaaacacacacacaaacttacattagaaatcttcatatagtttacactccttatattcttaaaaggatatactatacagaaatattccttgattattcaatattcattataaatactaaatattgtacagtccctagcgttgtgagatatatctgattacctacgctaaatagttctatactagtatgcttattattctttgcttataaagtgcttctttccctaaatttaagtatttgttaagatattttcctgattatagagttgtactactttctcatttgttccaatctaagaatctagataacctatttttgatagaattatgaataaggtaagaataaaaagaatctgaggaaaaaaagatctaagtgatggcttcagagctgttcaatgaatagaacaaatacgttagtatactgcttttgtaataactatttggacagctttgaggcctttcaaagtttccttttctgaaagtatgctgggttgttgagtggcctgcagataaacattagctaggtcatacctaccacattgtttatacatttggcacacagtataggcaaattattcaatcaccaaatgattattttatacttagcacatgcaaatactgtgctaggtcctgtgggaaatgtataaaattacaatacataacctctgtttttaagaattttagtttaagtgaaatataagacaaacacttaagatgcaattaaaaatgtaatttataataaatgatatacagaaggaatggatataagtacccaataagtgtggaggcagtaaaagctatagaggggtcagaaaattctactttgagtggaggtggcagaagtgtaacagatttgagtctggaaagacaggtaagagttaaatgacgaaatctgtttgaggagtaagggtctaaaaaattgagtgaatggtaaaactaagtaatagagttggcaaacgaattaagtggggtaatttgtatttccataagactctcatactactcatttgatacatatatccatgttacacatcatatattaatgacatattattatttaattgtcaaattgttaatggacacctttggtatctgtcctattactttactaatttaaaatacttaagagattgcttgagtttctacagaaagtgtcagtaatatttaatccagtttttatgtccactagaagttaaagtttctataaatcaaaaagaccagctaaacactgaaaagttacaaaaaaatgaaatcatggaaaatgacaagacaccacagactgacagtaaagcaatgtaaaaaaatcaattttatatggattctagccatataaaaacttgtgattttatatatagtaaactttttaaaaatggctgggattttgtgaaagtggctaaaactaacaaactaacaaaactaacaaaaatcaacaagttcctctgttaaattaaaaccaaagaattgagaatcggagtttaagaaacctgccaattttagaggaacaaagctaagtaaaatgccaaaataaaatatatgccacacgtggaaaatacacacaaagatattcggcatgccaataaaataaaagaatttaacactaagaaatatttcataaataaagccaaatgaaaagatatgtgaattatgtaaaaaagtttatacttataaaatatgacatagtgaagtgatccagattaggtagaaattaagtaaaaatctgaccaaattctcaacatcttatttttgattcagaatgcctattgtcttcaaagggaacaatgagtagcaaaaggataaatagaaatacagggcactagaaaatgggcgatcatcaaatagaaatcaaattaaaaattttttacttcaaagattcagccagaaattgtataaatccagaatacaactagttcaataatatgtctactcttatgtgaataaaaaaagagtaaatttataccactgaagttctttttttttttttttttttttagacacagggtcttgctctgttgcataggctggagtgcagcggtacaatcacagctcactgcagcctcaaactcctgggttcaagtgatcctcctgagtagctgggactacagggatgtgtaccaccacatctggctaatttttaaaatttgttgtagagacggggtatttcccaggctggtcttgaacttctggcctcaagtgatccctcttgcctcagcctcccaaagagctgggagtataggtgtgagctacagtgcccaacttcatttttaattttcctaggacactgtggttgattaagtaaactgcagcttctacagtgccctttatggcttgacaaaagttaggcagctctgacatatgagtaatctttctttactagaatgaggtataaaaattctgttaaagcctctcatcccaagcacctcaacttctttggaaatatcttattttttcttaacattgttccaccaaaattaattcttttagggaaatattaaaaaagaatcatagcttcttatttattctccaaataaatctaggagtgtcttaaattcctactctaaacttgtttcaaagatattaacaaggaactaaagtatttcatggaacatttaaatgaccagagaacaaacaggaaacacagatgatatacaccataacactctaagctatagagtattatacacatttacagtactcaattatataaaaccttttagaccacagttataaagcacacctttctgagatgccccaagtaagatgataaaggcagttatgaacaaaacagagcatatactagaacagtgatgaaaccaaagcaaatttgttgtcaacacaggtaatttatcaaccttctgatttctgaaagccagttttaaaaaactggcttataaacattgtgaattaaaaaaaatacaaaaactcagtatcttcttatatatcatcttgtatatcatatactcttactgaaatacagttcttttttttttaactctttttctttttgagatggagtctcgctttgttgcccaggctggtgtgcagtggtgtgatcttggcacactgcaacctccacctccgggttcaagcgattctcctgtctcagcctcccgagtagctgggattacaggcgtgtgctatcacatctggctaatttttgtattttcagtagagacggggtttcaccatgttggctaggctggtctcgaactcctgaccttaagtgatccacttgccttggccacccaaagtgctgggattacaagcatgagccactgtgccaggccaactttttttcttaaagagacagggtcttgctattaataattggcccaggttggagtgcagtggctgttcacaggcatgatctcactaccgatcagcatgggagttttgacttaatcccttttggatctgggccagttcacccttccttaggcaatctggtgtctccaactcccaggaggtcaccatactgatgctcaacttagtggggacacccgattggcatagctcactataatccagagctcttaagactcaagtaatcccctcacctcagccttctgagtagctgggactacaggcacatgccactatgcctgggtaatttctttttcttttctttttttggtagagacgaggtctcactacattgaccaggctagtcttgaactcctggcctcaaacaaccctcctgccttggcctctcaaagtgctggcattagagctgtgagccaccatgcccgacctctttttatttcttaaagtcaaatgaaaatataatattgggctttttggtgaactagctaaaggtgaaattgtgacggtatgggagaaaatagatgtcaatagtgtagagtatgagaaaaagaaataactaaaatgatgaatcttattaataatttatttgactatactttacaagacacatcacagaaatacataggtagtatgaaaactatgttttttacaatattcctgagatagaacaaaccattttaagcttcatattccagtaatacattcacatactaagattcactaaaattaatgaagaacaattaaaaaataaaaagtcatttagatatatgtagtagcaatacggctttataaatgacaaaatatttcctctatgggtaaaagtactaaagcaaacagcttcattttcataatagcaaaggacattaattaatgactacaatcacaataattttagactaagtaaaaaatactgtaactaaaggagatgctagttttgtatttcacataatactaagatttttttttaaaaaacatgggagaatcatatacatttgactattaaatcgtctgaaaatacagagaatgatgctaatgactagaaaatagcacatgccatttcattttaaagtaaaagataagacccagggaattacgagcctctcagtttaacctctgtggctgaaaagctgctaaagctgttcttatcagaaacagcctaaattttcagggagacgcagaggcttaaaaacatggctcaagcattcaaacaaatctgcaggagtacaaatttatctgacgttttctgatgctacaatcatacacaataaaggaaaggaggctgatattatctagatttccatgagacacatcaagaaatgctacagggattcatttagtccatggactatccatggaaaatgatgtaggtaaaataattactaaactaaaaaaaattgcttgctataagaaatttagttttagactcacagcatgtaatttctactgtcaaatgtctatcatatcatcaggctatagattaaaaaaacctaaatgtttctaagttttggtgtatgaaaatatacataactgttttctcacaaaagcataacctatacattgtaattaaaaagtatcagaaaaatatttaggattttcactttaagaggttaatttaaattaattttggaaatgtggtataactgtttagaaatctgttttgaaattttaattgtattaaaacaacaatgatgaatactgaggtggttaatagctttatctggttttggaaactggtaattgattcattatgaaagttagctatcaatcttcaaagcaagaaacttgattccaagaatattctgatttctattaaaaaaattcacatcatatatattttatatcatcttacttcatgaatactgaatatgtaaggaacagctgtttgccattactgaactaagaaattctgtttggttgaaattaatgatctactccatctggtttgaaacacaaagcagcatttcttaactactgtaaagttcagttaggaagaaatctatttgattttcagagtaaagcataagttttccatgatttaagtatctataccaaatacaaaaaataatacataatatctatggaaaatttgcacaatacacaattaagaaaacacatgaatgaaagtgtgagtggtattattaatgtgagtacagtgatcagatgtaatagtaatttacataatcatccaatcattgatcaaattgttcagataaaatgagataatacacaaaatatttagagaacatatattgagaacactaaatgcatagtagaaacacatagtagaaaataaggtgagtcactaattcagatataatcaccttaatgatttttatcttcaacttgctagagattttaattattatagaaatcctttccttcctctcctcaactaaatgacttcaatgaagtaatattaatgttggcaacagtacaaaacagtgagagctggaatatgcaaaaacttaccaatctttgtgtcaaactcatccttggaaaaaggtagtaatgcagaatcaaaaaggttataatacatgtaagatttacataaatattaaattttaccttaaaaacattagcatagtttagaaagaataaacaattactctaaagtgcctaaatcgtccccaaagttaccatatagagtttggtagtttgaaactaaagcaaaaccatggcaaaattaaactgttaagattaaataccttggaaaacaaatgatgaataaattatgcatttaataaatgcagaagaaaaatgaatattacatttttgaacggaagtcagaaatcttgaagttgtccatttaagttacacattctagcaattaataaacatctaagaacaattaattttccttgctacagcgttttagggagattccatcaaagactaacttggaaaaaaaaatggtaagttaataggtttgcttattatatatagacgttacatctaaaatcattagcagaccattcataaactaaaagaagtgcttattaagcttgggaatgtgcaaggctggccgactaaaatctctattcatagcatataataaactgtttactttcgctttggttatcacctgagttgtagaaaaggtcaggtctttcgagaatatctccttcatgaatgtatggctcaattcgatcatcaccatacaagtactgctcactctcatccatctgacgactctctaccatctccagccactgagagttatgccagcgaaacttttcactctgaattttcttagcccattcttcatcatattcctattgaaaacaaacagtcaactgttattatataagctaactcacttggcactcagacggcaatatttttatctcttgagaattttgggggcccttcactgggtcagaggaagcactacaaatacctgttcaggattattttatataatagccaacaaaaagcaattacatacataaagaagtctgtgtttgtattatcgatcactaatggcaatggcaaacactagaaaagtttaaatttcataaattcttatttaatattacataaatattgccagaatttaagcgagcagtaagacttcagtttccaaagagttcttgtgactataattaaagttgaccttagaacaaaatggatttcaattgcacaggtccacttatacacggatttttgttccacctctgccacccctgagacagcaaaaccaagccctcctcttctttctcctcctcagcctactcaatgtgaagacaatgatgatgaagatctttatgatgattcacttccacttggtgaatagtaaatatattttccttatgattttcttaaaaatattcctttctctagcttacattattgtaagaatacagtatataatacatatacaaaatatgtgttaatcaactgtttatgctattagtaaggcttccagttaacagtaggctattagtttatgttttgggggagttaaaagttatacatggattttcaactgtgtagggggattggtcccctaatacctgtgttgttcaagagtcaactgcatttgtggcactaatgacaggtagttagcataaaatgacatattttgctgtatcttttagtctagataacactgggggaagtactgttaaagtattgttttagctgctaaaatggtttactaaagaaaacaaatatcagaattgaatttaatttttgttccaaccacaaattaatgatcttatcttatttagttgtaattatttctttaaatgcttcttgttttgatcataaactcctatggagcaagattaggttattcactgacaggtgtatctgtaacacttgtcagaaagaaagttcttggtgaatggttttgaaggacaaacaggcaaattactgtaagctacagcagaacttctccatctactacttgtcccataggttgcagctactactgagtagtgtattgctttaacaatggacagcagaaatgatagcatggatagaaaataaaaggcttcagatatttcatgtcattgttagagttcttggttttaaattcctctgtcatatctttaaacacatttggttacagctgtctaaaaaggagttagagggatgcagggtaatagcactattaaggtgatcacaaaaactaagaggtagaccaaatatatattttagttaaatgctaagcaatttttcaactcaagctgagactcaaatcaaaatcacaatcacataatacatttctgggatataaaaataaaatctgagactttataataaatgtaattattattgtaattttcttgttaaaattttaacttgttgaagtttcacattatcagcaaatcctagcagtgtcagttgtcagattgcatgtgctataatgtacatttaaaaaatatatagctgctccctttcaactgaagttggggaaggtagaggatattttttgactatagtaatgctagtgacaattttgctaccaaattactaaacttgattttctttttaatttttattttaggttcagggatacatgtgcagatttgttatataggtaaactgtgtgtcatgggggtttggtgtacagattgtcacccaggtaataagcatagtaccaaataggtagttttcagtcctgactctcctcccaccctctacccttaagtaggtcctgatgtctcttgttcccttctttgtgttcatgtgtactcaatgttttagcacccatttataagtgagagcatgtggtatttggttttctgttcctgtgttagtttacttaagataatggcctccagctccatccatgttgctgcaaaggacatgatctcgttcttttttatggctgtgtaatagtccatggtgtatatgtataacattttctttagccagtctactgttgatgggcatttaggttgattacacgtctttgcttattgtaaacagtgctgcaatgaacatgcatgtgcatgtctctttatggtagaacaatgtatattcctttgggtatatacccaataatgggacttcttttcttttaccttttttttgttgttgttgagatggagtcttgctgttacccatgctggagggtggtggcacgatctcagctcactgaaacctctgcctcctgggttaaagtggttcttgtgcctcagcctccagaatagctgagattacaggtgcctgccaccaccacctggctaatttttgtatttttggtagagatggggtttcaccatgttggccaggctggtcttgaactcctgacctcaggtaatctgcctgcctcggcctcccaaagtactgggattacaggcgtgagccaccgtgtctggccaggacttcttttctaatagttatctattaacatttctattagtcatcaatctatttcctaatattattttttaaaattaagttgcataaaattaagagctatcataaacattatgtaaaaataataaacatttttattcaactgatagttttaataattgaagatattaaattattttcagttgataaagatcaactgaagatctttacgtcagttaaatctgatactaaactatacttgaaatagactattcagatataaataataaatccaaatgtcatacctccttagtattactgatgtggtcacagtgactgaatgtgatggtaatttatacaaccacccaatcactgatcacacacaaattattctgccaaaaggagataatacatataaagcatttagataacttatattgagaacacttaatgttagccattaccttaattaaagtaacggctctctgacatatgtgccataattatcaacatcttacaaatgagaaaatgaggccctgaacactgaagtaacttgatccagggtacacagctggctgtggctactacagcactgtaagcctcgggccagcaatgtggaagaggcagttaaacagaggataaatgaacatttgtcagggttcctgcagaatggattctttattgaatgagaatataacaaataacccccagggacaactttcagttctaagatttcgtaagcaagcagtgatatgggaggaagtcattgaccaaggagtgatattggaagaagtagcttctggtctggtaagtatattaatattatcctatcgtattctcaatcatgctctcactgagctggccatacttgggtgggtattgggaaaagagggagttgaaaaataatatgcacagagatgttgtttacaagcagttttgtggttcactttgggcttccaaaattaaataaaataccaagcgatacctcattatgtaatataggcatatgatcagcttcaaagtaatttagcctaaatgctaaatataactgtgaacctctttaagattcatataacttcacaagagtacactttttgttgccatatgtgtgtctgtgtatgtgctcaattaaagttagctgcagaaagatactgtcatattagaaatggccagataatttacaaagagtgatcacataatcatacagtagaaagaaaggataaatttattatatccattagggtaagacatttaatacattaaaaagcaaaatgataatgtggacaaattgtccatactaattggctttttttctaaaaaataagttggttgcaggttaccaaaactctcagaatatgctttataaaatactagaaatcctagcaagtccacattaaatacagaactaatttgaatgttatttttttaaagaatagtaagtagcttgtttcacttgggaagaggcataaaactaatttttcattttggtagaaaaatttaaatctgattgaattatctcaacaaagaggtattccttcaaggaaaaagaaaaatcatacgatctgatgatttcattgtaatttaaatttcaagcatattcattcctggtgtaaaacaggggttaaaattcagtcaagtgcccaaagcatataaaatatgtggtctgctattccagtaagagtaaaacttgactcctactaatacctgtgaaatgttacagaggtaggtaatatttaaaataaaaatatccttaaactacatttccgcaaaatgtatttagcctaggaagtaatgctttgcaaaaacaaacaaaaatcctgcttactccgagttatcatttcacaccctcttttaagattatcctaatttaacaataacaaaaatatatctaataaatgtaaaaatgtgtaacaaagaagtttcttcataaacaattgcccttctaactttagccttcttatcaccctacgagcttacatcattattcttattaataaacgtatacatacaaggctcagtttaaaaagagattatcaaatctatttgacaaaagtccaaacacacaaaccaaaaatatccatgagcatccatgactaacttttgatattttcttggtaaaactgatcttccaaggcagtgagttagcacagaacctagcaccaaatgtaatgactgcccttacacattcctttaaaattttcaccttctctcttttatcagttttttattgaattattgtatagaaccagtgcatctcttgacattataagcctaaaaagtatggtagcaatgatacagattgtactatcattttcttacttaaaataattgtattctaacttttaagcatttcgtactataaaacaataggtttaatctctacgactaacatactaattaacatgcattattgtttacaggatcacagtaaaaataccacggttattttctcagctctaaaaaagaagcaaaacagctcttctctcaggaaatacgacacagcacatgttattctataccaaactgtgtatttaggatattgaaaattatatcttgcaaaagatccaacaatgattccagaatcctactaggatgaatctactacattggcaagcagagttttcctaagaggtggccttgaaattaaatatgtgtgtatggttctttgttatagatcatagacggaaaatggcaaaaaaaaaaaaaaaaaaaaccttggcttaacagtatgaaagccttaaaagtttttccatttaaagtcttaaagagtcataacataattttgaaataatatttggagtttcatgattataaaagtaatattttcattgttgaaaatggaaaattacaggaaaaatgcctataaaaactttagcaagatagaaccacaatactatatcccaccagttttcaatgactttcttaactctaacatcaatggataactggaaaatattttaaaatatgtgtttaaaaaatttacaggctgagtatgaaatattattgagatattggacttgtgccataaaagtttgctctagtttgtgataatgttgcctcaggttttcaactgtttaccaaataaagcatcttagaatgaaatatgccataaggaacacaatattcattaaaatatttttacttctccttttccttagtagtaaatgttacttagaatcaaatgaaatagcattgttttgctgtataatgctgaccatttatgtttatgtttctgaaaaggtttaccagatttcttgaaaatgaaatattttagcttatggttgttgagattctatttaccaagtacagtaaattaataggctaagacaatggttttagacttcaggaaaggttcaaaagcacatttgggggacaaatattaaaagtaaatcaactgccacctactatacctgttttattaaagggtcatttgcagactaaaaaatgtgagaaagaatctcaaagtaaagatacacagtactttcccaaaataaaacatgttaacaacattatatccccctcctggacaaaactttccttttttatttttttcccttttccatttcagtgacaatttgctgtatcacattcctatggaccatcattcgggaatctctatcttctctatgtgctctgggaatcctcaatgaatatagtttagtagccatggcaaagtgagtttctttgtgtttcagcatctgcatttatagctattaataatatggtactgcataatataaagaacattggattaggagtcaggagacctgggctctggttctagctctgctactaactgaagtatgcaaccttctaaaggtattctaatctctcttggtctcagattcttcatttgtaaaatgaaacaaaactaagacttacttaagctctaacattctaaataaaaacctatgatttataccatgaattcataaagctgttgaaataactatcccaaataactgaaaaatactggtaggataggagtttcttttataaagttaacaagcaattcttaaatgaaaacccaatgtcaaaaaattttaatcaacatacatcattaaaataaatttctctaaccccatccaccaatctctagtcccttcttattattcactcccctatacccccagccccatatcagaaaataattatgagaattcagggatatcacagctgaatcacagctaaggtatgtcatcaaaacctatccaaagcctttgtggaaatattctaggattatagttttttcttcatttttgaaatacttcttttcacaaggagtacaccctggtgtcttggctttgagacttgagtctattgtgtatttaaagaaaaacatgctttgttttttatttccttctcttcttagctcctgacattatgattttaagcactcagtatccataaattctaaagtgtcgtgaaagactgatggtttgattttacatggaatgtgccatcctttttgaagtcctacatcattttgtttactagttaaccaccgaaacattatgaagccttaactagcctattatcagagcctgttcactatcaggaaaactctttgtcactggcttccgtcacaccttgtatctgattaacacactataggataacacagagctacatagatctgctttgtgttctaacataactgatggaaaacagattttcctttttcctttaatgtggcagccccctaattgagactgtaatatggtttatttaatataatttttcatactaaattaaagcaagtctggattaatttagttgctcattaaagttacggtggtagctgctaacaagatactttttatatcttaaaaaatatttatcccaataatattgatagacatacacataatttaacatacataataaagttgatttttatgcacatactatctatttctcaataagactgccccaagtgttgacctttagtcttgaccacaaagtaaaagaaataactaaataaaatttatttaagtaagaaataattttttttctttcatactatgcatgggttcttttaagtccaaatgttgccaattaaaaaaaaaaagtaacatgcataacaggtaggaaacacacacatttatgtataaaattatgtgtgtatatgcttaaattctaacaagttggaaaaatatcctaaatgtccgccttttggtttacgcaatataaagatgaactataaaagagggctgactaaatttatctcattaaacccaattagagtatatgggattaagaaataaaaatcaaacttacactgagaaataaaagaatttaccaagactgcaaaacaagcaagaaccagttctgcttggtctggaaagagaaaattttagaaatttctgccaacaattcacttgaaaatcactactcccacatccaacttgcatgccaattaaaagtgaccagcatttacccatgccctgctcttgaaagcttgagttctaatgctaaccctaaccctataaaaccttctctgtaacttctcttcaagacgttgtaagatacttcttaaagtgttctcccttactggcaagattattaataagaccaccttttctctgacacaggcttccttggttatctttgcagagaccataacaacgggtgatgtagaagctacatttaaagctatattggtttctttccttttaataaaccagccttattaagtacaattttgtctgtctggaatgaaggtagcacctacttttccaagtttagaatattagagcttgctattaattccagattattaaaataaaaacaatctgcccatgatcataattaagagttattaaaaaaggaagaggtaccattcaaaatctcagtgacacgaacctatgtcactactaaatcatacactggctagaaagatgacagaaatcactctttcaccagagaacctggttatatcccttttcctgtaaacaccctgtagatacagtgtgccgttagtacaaataatctagtgataggccatgtagtagtactgcttctggaatgccagttcacatgtttagagaatagtatctcagtgttctctggggtctagattgtaaatttttatattaaggaactttgtattgttgagttttgtgttctcagtgtctttcttagtgtttggcacataataggtgcttaataaacatgtattaaatgtctgacaaaccagaaatatcaggggaggatttctgaggttctcaaatacttcacacaaagctgaggatgtactgaaggatacaaatctaattgagtttttagaagttctctagatcggaggggtaggtgatgttcttcccttcatgattcccatgattgccttcatggaagagaaaaaggcaatggtcaactgacttataattcccttggaagaccaactagctataggcttctctctccttgccttcctgctcctctttgtacctacaccattccctgcctccccaagctacaagtaacgtagtcacacaggtgacaatgtgctgatgaggccacagagactgtatcatgtaaacaagtgatgtaatcctccttggtatccagagtactgccaccgcacacctgtttcaattcatcagttgagggcttgggcccaactacattaaacaaatcttcactagtataatatttgcataatttgggggacaagtactttactgcagaaagtatatttccccaaggctttcaaggcatctaatttttcttagtattattctgcactgtctgtcttcagtggaagataagtttgttttcttacaggtaaattgctttaagctacaaatattcccattctgtctatatattttttggattttttattattatagaatacagtcatgctgagaatactaggaaatcattatctagaggtaaaaagaattttaagacatcatccactcctctcctaagcaggtttcttataatttaaaaagtttgttatttagccattactaatgctaactgaacaaaaacttcacattctcccttgatggtctttttagtgaacaccatttcaatgcagcaatggaagcagaagccagaattttcataggtttaaagtgcggaaatgaaggaagtaaaatatagacagctgtttggaaactttggatctagaaagaaggagagctaagacagtatctagaagagaaaagagacacagggttggggtgactccagttttaagatgagagacttaagctcagagtttagaaattatttgaaataaatttctattttataataaatacatttgtattttatacaaaatatttttagatgaaggctgagttggcctttgagaactatcaacttacattctaaaccacatacacttaatctgtaaatctaaacattatcttctagttacctttcctagacagaaggtagataaaaagtatgctaaatgtaatgcataacagactgacaactccctcctttcctcgttgcttcaagtaagataatcacatacagaactataagaagttttttgttcttatactatatactttatatgcaacaatggcactgtgatctattagaaaatagtacatgagccatgaaattattctctaggcacattaaatattctgtattcataagccctgtgatcagtgacctatgtgtgaaatgtcttcatagaatgaggatttaatatgtacagtttctctattctgacttagaaatcaaagctaaaatgtcaacgtatccatttagttctacaccagtaatggatacttagtcaaatccaaaaaacagatgatatcaaattaagatgaatttctgaaataaaatgtgagaaagtgacaatgaagttcctaacggtgattgtctagtttcctgattacatcactagcagaaaatccaacttagtggatttccaactaagttattgatttttaaaaaaaaatgttattctgatctgtttaaaaagctaaagttaaacttttaaaactactgagtaggctacattcaataaactttctaaaggtgagccaaatccagttagaaaaagaaagcaacgtggttgtgcgtagcagtatatgccatatataaaaaatactcaaaataatcgagtatctggtacagccctggtgcaaggcccaaatccaggcagaagactgtggtaggcagcaaaattactggcaataagtctgcatggttcacagtttctaactcaacacttagatcatctctttgatcatatccctctagtcatgtatcctttaaaaacctccaaaactatgaataacagtaagatttttgtatttcccatcatttcaaagcaacttaaaggacaactgtatgtataaaataaaactatcaattaagtgaaaaaaatagctgatacaagatttgatttattaaaaaaatttaatggccaaaccacaaaattgataatgttttgacagaaactgtcttccaacaccccactcctatacaataatttatccgaaaaacaagtgactctgtgatgacatgtagatcagaactctgaatacctgtaaaacatctttaaggagccgatgacttaaaaattgaaagctaaagaacttactaatgtttaaaaagtaaatttagtatcattgtatatcctgaatcttaccaaaatacaaagttgggtttacactgaatgcattgtttaaaataggtttacaatgactttctcccccaagatgaagtcaattatactttgtgtagaaaaaataattacttaccgctataatatctaatgtattatcacagacctttcggatttcattattcttatcatgcattaggtctatgagatatgctggagcctctgaataaaaatggttaaagaaacaaactacatttgatattgtggctagtcaataatactacaaaaatctcatatttttctaaatctaaattctaaatggaaatataacccaaattttaaaataaaatcattaatacaagatgaccaaaaacacttaatgtttcatttgtttagaaaaacagggatagtagggacataaaaaagagaaaaatctagatgaaaatgggtaaggaaaacaaagtcagtaaatctcagaaagtacaagaccacatttctgaatacatgaggatcatgaacataaatgaagaggaagctctatagttgtgtagctataaatgcttcttgatctatcctgctctcctaaaaattcaggaaaactaatttcaaacaaaactaacaagagagattcatggtcaaaaagagaaggcatgataaaacattttcacataaaagaaagctgcaacctaaaatatcaaaagagataaaaataatttaaaaaatagtgtgtatatatatatatatataaacaacacaaatcaggattagaaaaccaagggaaataaaataattcagaaaagaaccaaaaacaaaagcaaaaatcattttggatatataaaaattaagataacaaaagagtaaatggacacaacagataaaattctaagagaaacagaagcaaaaggaataaattttaaaataaaaataagtgaaaagagataaaaagattagaaaatgacagatattagactaagaagatccaacacaatagaaatcccaaagaagaaaaccaatgtaacagaacaaaacaaatactaaaaactataattcaagaaaactttcctgaaattaaaaaaaaggtgcacatttgcatacttagaaaaatcaatggaggatgatataccaagtcaaattctagtaaaaaaaacttgatattaaaaaaaaaaaaagaatacttctttggtctttctggaagaaaggccaagttacttataaggaaaaggaaattaaattttcctctgactttatcacagataacaataattagactgactacagacttctcattggcagtccaagggaaagcgaaaaaacatcttcgaattgctgggggaaataactgtcaacctagaagtctatattctgttaaattattattaaagagaaaaaatagttattttcagataaagacatttattatccatagataatattcactaagtataaaagcatatacttgattatgaaagaaagtcagctcgaatagagaaatggaattcaggagacagtaaataaggaaattggtcaacatactgtaaactttagataagcactgttatttaaaaaccaataattaaaatagtgattaattctgagatgttacaaaagggttataaaatgaagtgaaattatcatattggatagcaaataacatggaaaatagaagtggagatattagactgtcaaatagaaacatatactcctttagaacttggtgaacatgaatgttgaaatttaagtttgcatcccaaaagaaaaaaaatgggatgtataatcacaaataagtaagacagaagggagataataaagcaaattcaaattaataaagaaaccttggtgaatctaaaagaggaagtgaagaaaaaagttgtgaccttgcatcaatactattaattggtcttagttaaaacaatttgaaaagagtccacacatttctactaagaaactctagcacatgtacacaagtacataccattatttgtatcactgattacacccaaaaaattttatcaacagtatcatgactagtggcaaagtgatgacttaactcattagtgttacttactatttaaactgttgttttttaaaaataggtttaggggacccaagtacagatttgctacatggctatattgcatagtggttcttactatttttttttagggttaaaaaagatatatttaaaatgtagaaaaaatatatagaataatgtatttgtgcattttttaaaaatatgtaaaaaatatgtattgactgtctcttttctccattggaatgtaagttccattagggcagagactttgcctatcatattcaccatagtaccccaggttttagatcataacaggtactcaataaatttttatttaatgaataaataaataatatctattctatatacttcacatggttttgtgagaataaaaattattagaaaaatctttaaaattctcaaggggaatctaaaataatctagacaaatgtggattataatcttccctcagcagccatgggagactggttctaggatcccccaatgatgccaaaatccacagatgcttaagtctctaatataaaatggtgtagtatctgcatatggcctatgctcatcctcccatatacttaaaatccttcctagattacttacaatacttaataaaatataaatgctatgtaaatagttgttatactgtattttctgttttttattgttgcatttctattctctattagaactttttttgaatgaatttaatctatggatggttaaatcagcagatgaggaacccccaaataaggagggccaactgtattttatttcccatactgcagttgttgagatcagcattagttctcaattcttatgtgattgagtcacagttgagagtcagtttaatattttaaatatctgaatataaatcatatatttatctaaaataagtctacactagctatctcatatatcaagtattctgttcaaattatatcaaataatattgatcaaactttctaacaaaaaataagaaaaggaataaaatattgcctaatagatttatttcaaatattcatattggattcatagggagaattacaataaaatgctaaaggttatggtgaaataaaatattgcaataatttttaatatgtaatacattgtaacatgacagatttaaatgccattgacatcaacaaaaattctgttttttcaactccaaaacattttttaaatttattttttattttcagtttttttttagagacagagcctcgttctgtcatccaggctggagtgcaatggcatgatcatagctcactggagcctcaaattcctgggctcaagtgatcttcctacctcagcctcccaggtagctgagactataggcatgcaccagaatgcctggcttagaaaacatttctgagttttgtattttggaaaagcacttcagtgatctttatccaattttaagacacaaagtttttatgaaaattttaactcagcagatcttttatctccctgttgcaccattatcaacatgttataatctttaggacaactattcaaaaagtattgactccagatttagtgacataaaacaaaaattaaacttgggggaaaatgcaaagaaagttacactgaaaagaaaggtcaaataggaattctcttaattctgtgggctttgataataaggtactaaatgtacattttaaacagacatcccaaaacagaggcagtaacacttattcactgtgtacaggtacctggtaggtactttaaatacttcactttttagtcctcacaaaaaaccctatgagatgacctgtaaatagggtggtatttcaaagaagttacctagaaaaactacattttcattttactgttttctgtagtggcttctatagttatgtaaattttaagtaattctacacataaaatacatcttcagagactctcaacccaaaaaagcatattaaaggttccaagaagactctgtagcaagaaaacttgttaactttaactcagtgtttcccaaacttatttactatcagagaaccttttttttttcattaagcagctgttaatacttatgttccatggaatacagctggggaaaaatgaatttattccaattattttaacactgttcaaaagcatatttggagtttatctttctgggaaagtcagtttataaaccatattaaaaatatttattactttctgtactgttagctgttaaggcagaatagtatttgtatttcgatagcccatattaatattaacatttctcaaattagacttgttatttaccagacttgactcctggaaactctatatggttccagaatttttaattttttttgagatggggtctccctctgccacccaggctagaatgcagtggcacaatcatagctcactgcagccttgacctctcaggttcatgtgataatcactgcttcggtgtcccgagtagctgggactacaggcatgcatcaccaggcccagctcatattttatttttttatttttagtagagatgaggcctcactatgtagcccaggctggtctcaaacacctgagctcaagtgatgctcccacctcaggttcccaaagtgctgggattacaggcatgagccactgtgcctggccaatcacactggattataattttatatttcttgtatattatacttgtctatctctccaactaaactataaactccctgaggtcaaggactttcttatatatctaacacataagccagtatctgtttagatggtcaaagcttgagaaatgtgtgaataaatgaatgtttaattatatgtagtaaaagagttagcagatatcaaaattttcagcttaagaggctgtgtagatgacaatgttgttattcacaatgaatacagatggcaggactgctttgcttatcaggagaggatgttaccaatattgagtaccctttggatgcgagaatgataaactaccaggtactaagtacctctgtgtattgggaactattacaggcaatttaaatccattagtacttacaacaattctacaaggtaggaggtctttttattttaatattaacgttacgggcattttttaggtacctcattgtatcctagggaggttaagtaactttttccaaggtcctgcagcttagtaagtagcaaaaggtaattaaaattagggctatttgatttacaatgctctttaggctacaacatgctatgcccctttaggtaggtggaaggtatccaagaggcagttagcaacaaatgcctagggctcaagataggggttatgaagattaaatagttagcatatagttggtagctgaactcatggaaatagatgtggtttcccaagtagggtaaataaggtaagattagaaaagaaccaagaatagtcctaggaacctctgatgcttacagtgtgttaatagagaaggaagttctgatatgtttgttaagtttcttaggaatcacaacctgacaagttaataaaattgttctcattatattctacctatatactgatttggggtcaacagcttccatggaaaataggttatcttgtaaatttatctcaaaacttagtgttttctacgttatttcaacatttgcaaaaaaaaaaacaactcaaagatgcatcttttctgaatatgtgaaatattgttatctacggtaaacactgaaaggatacgtgtttccttgattatgacgtctcttgtggcttggtggaaaaccatctggtagaagacataaattatctgacacacaaattcatcatcttcttgttgagctgtaaataaacaaaaaattcaaataaagaatactatgtttatataccaaatttaaaataattgaggggaataatatagaacgagaaaaactaaaagtgataaggagacaagcaagcagaaatggatttaacttctatgttcctaatgtaaaatagtaacagttatcaccacttgttttattcatcataagaattctttaaagaattctaatttgtaaaataaacctggttctattttgtctttataatgttgacttctcaggagaaaaataattcttaaaaattattataccttctaaactctaagtttttggtggaaattgaactatcataaaaaggtatttccttttgttgaataatgttaaactttacagattgcatgaaataataagtaatttagtttccatctaattaattataatagtaaaaaagttacataatcataaaggctaattaataaacctttaatatcatacaaagtaatttacataacagctgatgtccactgattaatatgtaatggaaaaagcataattgcttatagaaatctaaccttaggtaatgattatgaaattagatttaatagtatagtttgctatcaactcttggtaaaagttcaatgacattttagaaacagagtttcaggtcaacagagtatcaaaccagttgtgtagaataaattgtgggtcccttaaagttcaatttgtcccaaatgatctccctcactaacttgccaaagtactactctcccaaacaaattgggctaaatttctcactattaattactatcttggtatacagtattccctcacttaataccaatggttttaatcttgaaaatctgtatatttcttaaaaagagtattataaagcctctgcctgtgataatctcatgtcagagaacaccaaaacatagtaaaacactctgagctggctgtgtcagatcactttatgaatatcttagctctcttgattataatcactatgggacagcaattccaggatgcaggtcattttgcttcaactttcttcagctctccacaaaatcttcattctcactctatcaactacgtgtctttacttttacctcccaactacttagtctttcttttaattatttctgatctgaaaactgactgtgagaagagtgtaccaaagtaaatacaaatatgctaaaattttgggaaggaatacttcaaatatggggcattatctctagatgacctattaaaatgaattatattaaggaacttacaaattaaattaaaaaaactcaaaagagaaaaatgcacaaaaggcttaaataggcacatctttttactggctatccctaaataatcaataaacataaacaggtgatgaacttcattagtcattagggaaatacaaattaaaatcacaatgaaataccagtatgatggctacaattgaaaggactgacaatgcccagtattggaggtgatgtggaaaaattgcagctctcttacactactggtaagaatgaaaaccagcagaactacagattggcatagtttactaaggccaaacacatacaaactctgtgacccagccattctactcctacgtgtgaacctaatggaaatgagtacatatgttcaccaaatgaaaggtttcaaaatattcataggagcattatttataatagtcctcccccccacaaaaacctaactctactatccatcagtagtagaaaggataaatggtggtatgtttatataataaaatattatacataacaatgaaaatgaacaaacttttgtatacaacatagatgaatgtcacaaatataaggtagaacaaaataaactagattccacttatatattaaagttcaaaaccaagcaacactaatctagtggtgacaaaataaactatcttttgttcaaactaaccactttgaaggaggtggtaatgactgagaggagggagaagaggcacttctaaggtactggtaatgctttattttcttacatgagtgataataacatgggtatgcttacactgaaaatacattgagctatacttacaatttatgtatgttattacatatttgaaaagtctattaaaattaacacaaaatgcacatatattatgcctagtacaagatgaactgagatgagagtatcttcttcagggatctcatattagcatttttaacttctatactattcgctagttatgatgtgtaagatcctagagaacttggccctaataagattcagataaattttgtatgcaatatggagaagaatgagccctgccccttaagagtaatataaatgcaaggggaaaactctaggcctgcaatgtcaaatattgtagccataaaccactgcagctaattaaattaattcaaaaattcaggttatcagttgtgacagccacatttcaagtgttctacagctacatgtgttggacaccacatatatagaacattttcatcaactaagaaatttcagaggacaataaattcggatctagaagggaatatgatgtttagaatcagcttccaaatggaccttccaacttagaaatcaagttttaaaaaataagatttgcacaagagaagagatccaattcaaaccaacacaaatctcaacagaaagaagtgatatagccgggcacagtggctcacgcctgtaatctcagcactttgggaggccgaggtgggcggatcacctgaggtcgggagttcaagaccagcctgaccaacatggagaaaccccatttctactaaaaatacaaaattagctgggtgtggtggcgcatgcctgtaatcccagctactcaggaggctgaggcaggagaatcgcttgaacccgggaggcggaggttgtggtgagccgagatcatgccattgcactccagcctgggcaacaagagcaaaactatgtctcaaaaagtcaaaacaaaaacaaacaaacaaacaaaaagaagtgatataatacagtggtcctcccttatctgtggtttttctttccatggttttagttaactgcagtcaaccatggtcaaaaatattaaatgaaaaatcctagaaataattcataagttttaaattatgcacaattctgaatagtgtgatgtaatttcccactgttccactccatcccatccaagacatgaatcatccctttgtccagtgtatccaggatgtacatgccacctgcccattagtcccttagtagccatctcagttatcaggtccactagcatagtattgcaatgcttgtattcaagtaacccttatttcatttaataatggctccaaagtataagagtagtgatgctaagcatactgttataatttttctgttttattattaattatggttgttaatctcttactgtgcctaatttataaattaaactttatcattggtatgtttagaaaaaaaaagtatatatagggtttgatagtatctgtagtttcaggcatctgctgggggtcttggaatgtattccccttgattaagttgtgactactatattggttgttcaaggttggtgaggagagtacttctgtaaaattggtcctgaactgctttacagcaacattcttaactttgaaagctaaagatctttgatattactctatccaatcccagttagcagtatatttaattcatttttcttgattatataagttgctatgaaacaattaatgtaatgagaaaaacagattacagactctgcattttatatttaaatatttaaatcaataagctgtttagacattaacataaaaataaattaaggttatttaccatttagcaattcaatgagtgcagggattatgccagatttggctagcaatgcagcacaagagtcatccatggatacagttccaatcattataaccacttctaaaacaagatcatcttctgcagcacctagtgaagtcaaaccatagaaagttttcactgaaatgtcctgatccaaattcatttagagtatcaaaatgtaaatacacagaaaggatactgaaagctattaaatcaagtcatatgaatccttgatatgctataaatttgtcctttttccaaatttccatgtttgctgatgacagtttgtgatagtgggggcagggggcagtagaaaagtggaaatgagcctttgagagtacaactgaatgacaacatagacacagaaaataaaagactcatttgaatgcctcaaagacctttgtgcgtgtttatgtatatgcagagggatggtatttggtaattttaaagagacagaataaaaaaataccaaaagaccacaagaaaggtagaataggaaatagaaactaacataagaaaacacacttttaggaaaaagagaacatatatgtaagaggtgatccagtgactacctttctgggagaagagagctgtgagaagaaatggcttttcctaacataataatagtcacacaatactgctctagcagccttatccataacagaaagaaataacttagtgattatacaaaagtgaaatacttagcacaaacctggttttagtttatccttgaggtatggaaccaacttatattctttaagaaccaattcccagtctaagtctggaatggtcaagtttgcaagagttcccaaacattcaatcacaaactcctcttcttcatcattagagatctgggctgcaaggtccccaacataatcctgaataaaacataattttaatataaatttaaattattttttatttaatctaataacccacaggaatctaacaatttaactcattgaaagaaaaagtaaatatcaaatgtgattttcttgttttaataatcttgagctaaattgctaaagaagcctatggtgaactggtttaaggcaagaagactgtagtggggtggagggattaggggtaagggtcacaaaacaaaaacaacattgaaacataggttgagatttctaggtgctaaactaacaaagttgataacataagagcaatttggattataaattaatatttgacgagacctcagtaagagctgtatttccaaatgtagcaatttcaattcccagtctatttgaatagaaagccaaaatgatacttacaataaacagatttttagttggtccatcatgctgagaaatgtttctaatcattttcatcagcaatggatccttaaacttcagagccctcttcatgagcatcttcagcccatttcctgaaacagaaaagtcccccaataaaattaaggttagcttaagtttaataattttttgtttagttctcaaaaaagccacaacaatttacatctagtaaaatgcataactcttaagggtacaatttgattaatttagatgcaacccataccatatatcaacatacagagtattttcattccctccagaaagttcacttgtgccccttcccagtcaatcctgtttcccagatataatcacttttcctcttccctgtctcatttttaaacatatataaattttgcctgatatagaacttcatataaatagaatcataccatatgtgctcttttgtgcctacaatatctactacaaatgttaaaaacaaaaatacttttgactcagaaaaattgtacttctgggaatttatcctaacaatataaaaatgaaaatgtgtaaagattcagagaatgggtaattactatagcactgtttgtaacggaaaataagtggcaatgaactatatccataatagtgaagtaaactatggcaaaattctttaatagacaattttgcagttattaacaaatatgctttataaaaacacttaatcacataaaatattatttcaagatattactaattttaaaagaatgtatcatgatatatagacaatcacatttttatttaaaaatatgcagaagtattacactaaaatcttacctatgattatctgtggatggtaggaaataaagatttaaatcttttcctttttgctcatttgtgctttttataacaaacacatactacttttcaaataaggcaaaaactatcgggcagactctgaaacatcataatgtatgacaggctattctacaaagatattacagaaataatctaatacatttgtattttattaccttatattgtaatagactgctttgcaaagaaaaagtttcattttatctagaaaatgttttaaaaatcaaatttcaattaaggctaactcaccatggtttgtaaaatgttatcagaaggtaagtgtctgcatttatgacgtaagaatattctatctgacctttaaggattatagctataatgaagaaattatttgaaaacaggacttacataatcattataattcttaattccttatatctattttccatcatataccaaataccatatgctaaaaaagttacctacactcaaaggcactgaccttcacagataagctgtacatttcttttgttagcagcaagattaatgcagaaagaaatgagttccaagtcaattcgttcatctgaacattcaaacagcatcttcattaactagcaagaagcacagggcacattttactcaagaaacaaagacaaaaaaccaaacacagaagcaatatttttatcataatgtgttatcttagattgtacattgggcataatataattatttacatttcaacacataaaactggcaggcgttcactgttcaacaactggatgaataaacagttaatgaactcttagatgctcagcattaaatataaacttctaagtacagtggagaatataagagaaatattagataaaacatctgtccttaaataattaaacatattgtttggaagcagagcattccaagcaaagaaaatagcttatgcaaaggtcacaatgcaggaaaaaacagtactctttgaagaattaaaagcaagcaagcattgttggtgaaagggaaacaacagttttaagagataagaaggtaaaaaccagatcatgcagggtcttgaagtacatgttaaagattttggccttcgtgctaagaaggataatgggaagctgctaaaagcttctaaataggaaagtgtcaggataaaatttgtgtctcaaaaagatttacccagtgtagaaaatagaataaaattgcaagaaaatatggggaaccaggtaggatgctagaggaaaagtccaagtgagaagatgggtgtctgaactaggtagagataaaaggattgattagacatatatttagaaaacagaaccaaaatggaatgtagtaactgactagatgttatggttaaaggagtggaggagtcaaagatgacttctggatttatgcactgagaaatgacatacatggtgctgccaacatctaccgaaaaggagaaactagggtagaaaaaaactttaaaggaaagatagtaattttggttttagatatgttgagtttaagctgcttaagtgatagtctagtgcaggtattcagtaggaagtcataaacacaggcctgagtttagaagaaatgtctggactagaggtataattttaggaactggcatatatggttgaaaactgaagctgcaggctaaatccaatcacttgggcatgggtataaaatgagaaaaaaacatttttagtgataagagaaaaagaaagagggtctgaaaaacaacagacaaaaaggtaagaaggaaaaggtaggctacctatgccatttagcagtaatctagatttgtcatggtgagaaacagctgctataataaaggacaaatgaacaaattttatgctatgttttggagaagctagtcttctattattgtcaaatcagcaaattaacttagtgtatagtacataaagagagttttttctcagcccaaattgttaacaacaaatagaagttattcctaaaatttataatataaaaacttactatgttttatctcagggcaatacctttttagaacatgttggattcatgccttcatgaatccaacacagcgaataataaatatttatttattttagacctctttctgttaaatcttgttttgattactgttagttcaagatgacttctgcatttcaaaaatgatatgtggtcaatatacaaaaatcaatcacatttctatgtgttagcaatgaacagctgaaaaccaaaattaaatttggttaaattaaattaaataaaaaacacaataccactcaaattgttaggtataattctaagcaaatacactgatctgtatgctgaaaattacaaaacactgtagcaggtgaacggctggcatgtatcatatgctccccttgagggcagatctttaaccacaaatattaccactgatagtatctctgggtaagaatcattaatacttaataatgccacagaataaaaaaagattcaagggcaaaagtaaaataatcttaatttactggatatatatttaacagatttcactacctatctgcccaataaaaattaaattacaaataaaattgccaataaaaattaaattacaaattaccaaaaatgtaggtgacaatcctctaattaattgctatgttttctaaactgtaattaaaaacctaccatagatttttttcaatctgagaatcggttacattgaagcaatgtttcaagcaaagtatttattgctaacaaaaagtatttacttcaaatcaacctttgtagtatgaaaattagccttaaacacagggctacaggtcattattttagaaggtaaattttctctaaagtaatttccatattaaattctacctagaaataaacaatcagaaactagatttttagaaaataatgcatggctcgaaaacttactcaactcccattccccatatcgagctaaattaggactaaatataaatggaatgcataatgatatagaattagtttttcataataagagagataaacatttcaattttaattaaagctttcaaatttaaaaaagcaatgtttagttcaaactccacatgaaagagtatgtctttaatttgattgctatgatggcacttcaaaagtaagtgtaattgctgacaactagaaaatattaaaactagatttgttctgttttaactatgtccattgtcatcttttactaatttaccagaaaagcactaaaagggcttcagtctgtgcgatgaagaggcaatagtgttcaatcagacaagtcccatattgagtatcagataccaaagacccatgactgaaatcactgtgtctagactctctggcacctgacttcacttatttaccactgaccagaggccaacccccacagctctctgtattcacatataactctaccacccccatcccctacccaaacatctttgaatgattataccagaactttgcatgcctccggaatctcttctgactggctactccctaactctcctgtttgaagtgatgctctggtttctgaacttcagcagataatggcaggcaagagcaaagggggctgtcagaaaggacgtttaccagcattcagctaaaaagaagcatgtagatcaaagggggccatataggacaactgtggtggaaaacatgtggatcactatgaagattcttgcacactgttctaggataaaatattaaataacaccatgacatcactacctaaccatgtactttcattggccattctattaccaataaatacttttataagcatctggatggcatttgcacccatttaaacaaaacatgcatctcagaggtctaaataacaatgaactgttaatgtgtacttttaactattattagaatacaaccattaactcccgcttatcctcaagtatgcctacctgaaacaatctacccactgagaccattaagatcatgtataaagacttgacctggcccctaaattttacagaacagtgatacaatagggtaagaaaattagaatacattggataactagaggtaataaagtacaaaggaagcaaagcaatataatattgggagagattatgagacatgttgtatatataatcacccactccggatgctaaatattttctaaaagtgaattctaatctaattataggtttattctataaaacacatatgtgataggcagtacttaaaatggactataaatgggtcaaaatggtgacaaagattttactaagaatatcttactttcatatagtttacagtttataaagctcctttaatatatgtaattaatgaagatgactatattcaatttttttcatcattgaaatgaatatgaattactactaagccactgctttcctacattcaaagtcatgttatttgcaatacatgaggatttttaccaagcaaaaattaatatgcataattacaaacgaacagaatattatattaactctaagatattccaaccggggttatgactttagtaagtaggttaatcagtggctgattaaactcatgaatgagtttaaagccttattgatattatatacattactttgagtagccaatacctctaaaggagtacctttttaattcctgaaggaaacttggaaatttcatttaatttctgacttgttttccatgattcttttattttgcaattaacttggcactgggtggcaataaaaccacgtcaacttttctctttaaatatgtaaaatttggcactataagttaaaagttataggctggataccacattaggagcaaatatattgtacagtatcatttggttttctcaaaataccagctcatatagaagctttgggatgtttacaacataattgggtaacataaccttattctgttaagggctgaaatttcaaaaagaaaaaaatgggaaaaagaaaacatcaaaaatccttgacctcctaaatttgggaaatattgttcacaaaatacagattacacatgttctgaaaacttcattgcatacatgtttgatgttagaaaactgtctggtaagaaaatatgcacggatattgctcctgaaaaggtatgggagcaattttctgtatacacagttttaaattgcaataataacagtatctaaaaagtaatctagacagactcttatttctgattctttcatttaaaataaaattttacattttatatttgagattatacattctagaagaataggataactccaaattcaaaattctataagtaagtttcctatccttcttggtttgcatttatttatcttttatttaatgctattctctttaaaatctaaatctggataaagacagtcaatctcggtaagaatattatgtttttggctgctttccagttcatatcctgtggtcaatgaagttctgactctaaatggaatcggaaaaggaacaccctttgaaactgcaaagcagaaacctttagaacatatggagtgagactgtagtaaatcacctgtaatctcactttgacttggctactcttttattgaaaacttgtttgacaaagagtttgattacactttgcattgagtatagtctgacatgcattatctctataagacacctgccttgctagataagatatgctgtatattctttcagggatgtctatttcctataaacaagcgtaattagtttatcccctgatataaaagtctaagaaattacccttgagagtttatcaattttttaaatacatgtaagtgaaatgttaaaattcttgaatagcaaatcacttttagtactgttttatttaatttggaatgaatgaaagaacagtcaattagaattaataaaaagttatggtctattttttactatatattatttttcaagtaacatgcatttaataattctttttagacaaggaattatgtagtaggagtcaagaggaattaccttcataagtacgatttgttcatattcttctaacaaaattatggaattatgctttgttatcatagtgactcaggttttgttttgtccattaatttcagacatgaacctccaaggaaaatagagcgatttactcttctccaatcagtgcatatttacaagaagcacagagttcagtatgaaatgagaacactttacagatgtttagaggtgagtgtatttgagaaattctggcatttttgaaataccaaaaattcacactagcatataactttactttaacattgactagattgacttctttcagcaagcccatgtctgttggttgtacagaaggtaaatatcttttagtgtttatggaagtgtcatggtaggaaaagtaaatgcaaataaagcaatcctttagagtagtgcataccttaactcaggaatgcagattatgcaaagatagcattggaataattttgctcatatttcaaaaattctagtgaagtttttacacagagtatgtttattgtatatcatacatcctacaatttttgttttagaaaactattttataaaaaataatgtaatattaaaaatcagcccaaatagtgttacaataatcataattcaaattagtggaaggtagtttaataaagagtaatgacataatagtgatcctatgaatgttaattccctaagagtaaaattgttatgatgtacagaatctctacccttataacatacagtccatgttacaaaaaaaatcaataaactccttcaagacatttaggacagatatttatttaggtctatttagacctaacatataatacatatctagccactgaatcatagcaaaaatctttcttgagagcagttgtataaaaatgaaagaattttgatgaaacattttcccatcagagaatgcaaagcaattaaaactattaatattaaccataaacaaaattaaaagacatgtgacaaacttaagcaatatttgtaacataaaattaaaatagttattatatacattgatcttatttgttaataataaaaatattaacaaatcagttaaaaaattgggaaggcccattttggtggctcatacttgcaatcccagcactttgggaggacaagcgggggaagattacttgaagccaggagtttgagactatcctgggcaagaaagccagaccctgtctgtataaaaaataaaaaataaaaaaattaaccagtcatggtggtgcacacctgtagtcctagctacccaggaggctgaggcaggaggattgcttgagcctaggtatgaaggctccagtgagctatgactgtaccactgaactttagcctgggcaacagagcaagatcctgtctcaaaaaaaaaaaaggaaggaaggaaggaaagactggcaagagatatgaatgatctgtaacagaatatggataataaacacaggaaaaaatgttcaacctcaccaatattcatggaaatgcaaataaaaagaaataacgaaccactgcatatttagaagaacaataatatccagtgttgctaaaaattaaatgctagctggaaataaaaacttatgttttcttagaagatattttggccaaaacaaagacacaagtgtttattatcttttgacttagctatcctacttttaagaatttaaactaaagaaaaattcagagacgtggggaagcatttacaaatatgatatctcacattattttcatttgcttacattcatttttatgtgataaatgggaaaaaatctaaacatacaatttaacaatatttaaattatgttacatccatgtaatagaatattatacaattaaaaataatttttgaagaatgttcagtgacatgagagtataattatgatatattaataaagcaatatgtaaatattacatataccatgtaatctcaatatattattttttaagtatgtagagagaagtgtaccaaagtgttaaatagttatctctaagtttgggataatggaaagttattttcatttttatacagttctgtacttcctcaattttctataataaatttgtagtattattaagaagagaacttttttagagagaaaatcttgacaaatcaagagaaaagagtaaaaaatatatatatttgttaaatgtttttcataaaacacttaaaccacttacctgtggtatacagtcagtgtatgcaaacattgatttaaagcggtcatccatgcttatgtggtaaagaacacacattgctatttgtttgtagttgtcattgcctaggaataaaacatcatggtgatgatgctataaatatatattttttatatagcacactcatgttaatgtactacaacttaaactactgaataaaatctttatataaacttaatctgaaaaatattttgagctatctatttcaaatccaaaatttagagcaagcatattcatgttatatgtgaaacatcactaatttccaagaaagaatgtctatttcccaaggtatagttttgaaaaagaaaattaaccataggaattaattattttcatgagtccaatataaaaacaattgggtcattagcctccccatctttactgttttatcaaaatatgtgattaatacattcattgacagtggtgatgtttagatatagtaaataaaaaagcatctttctacaaatcagaaactgaaaatatcatccaaatgatgaaagaagtaaagtagtagttataacaaaaaaataaaatatatgactataaaatgctataggctataacacagccgaaatatagtatgaagaatgtctcagaacttctaaggtaagattattctggttttatatgctttgaaactgaaaaaaagtgaatacatatcaagatttgaaaaacaaaatgggactttaatatattatttaatcctacctgctttcagacagaacatattttaaggacctacttacaatctcaaagtcagtgataaaactagagccagaaaagttgcctaactaaaaattttatccaaaaaacaatatcctttttgaaaattctaggccatgagaaattctgaagatattcccaaggtagttagaaattctttagaggaaataaactggtattttcttttctgtcctttttttttttttttttcagagacagagtctcactctgtcgcccaggccagagtgcagtggcacaatcttggctcactgcaacctccacctcccaggttcaagggattctcctgcctcaacctcctgagtagctgggattcaggcgcccactaccacacctggctaattttttatttttatttttagtagagacagggtttcaccatattggccaggctggtctcgaactcttgacctcatgatctgcccaccttggcctccctaagtgctgggattacaggcgtgagccaccgcgcctggccctaaactggtattttcacaaggcctagtgtagaacatggaagttgttcagtaagtatctgctgattgattctgtttttaatatttaaatataaaagctgaagaaataaactcatttaatcaaagatagaaattactagttctaaaaggggttcagaattagagacaaagatttgagacagaagtattcagtttcccagggtctagcaagcttcaggcaggtgatttgcttgtacccagaaggtgaggcttgcagtgagcccagattgtgccactgaacgccagcctggccaacatggaaaccctgtctctactaaaaatataaaaattagctggatgtggtggtgtgcacctgtaatcccaggtactaggaaggttgaggcaggagaattgcttgtacccaggaggtggaggttgcagtgagcccagatcatgccactgcacgccagcctgggcaacagagcaagactgtctcaaaaaaaaagtaagcaaaaaatacagtgatcttctatctctcaaatttactttgaacttccttaccatttgatatatttatctaacatataacctccatgaaagcaaggactttattcactgcattatccccagatgcaagaatagtacctagcacagagtaggtatttaataattgttgattggttaataataatttattaaacatttactatatatcaagagccatgctaaacagactgtatggcattgaatctcaaaacaatctgtcaaataggtcttatcatccctatgtttcagatgagaaatctacagtttagagaaaaataaatacttgccacacagccttgtcagtggttgagtggggatttaaccacaggtctctctgattcccaaatctttaccaggttatgttacaatactactctcaaacatttttcttcctcatttgatgcctttggtattcaacatttttatatcacaaggtaaaactgttttctaagtaagacattatcaggtataaaagactgataaacactgatatatgagggaattaaacatgttttaaaaatatactgctttttaaatccaggttttagattttgcatcttgcaaaactgtttggctaattctatttcctactgcttacaatagcagtaagaacaactccttgggataagataaaaacaatatatgtttttcagatgaatggacactagtaagcattttcaccttaaataaaatctataaattcactaattcaactatttggaatacaacatatacaggaaatacattttatttatatgaaataatatttatttatttcatctatttttaatttttccctatggtattatttatagaaaaattaaatttatagaaaatttacagaatagagagtcaaatcatttaaggtaaatttcacatttcttctattgtttgaagagctttactacaaaatttataaagaagagagaagctgaattagagtcagagataggctctaaggataatgattattgactaaggttaaaataaagctaagataaagtaatgtgggagaaaataatatttaaagtttttgtttaggggtaagaattttatttggcgggcagtaggtaaaaattgtgaaatcgctccaagtaagagaaaagtgcagacaaataaatgttcttaaccccaacaattttgtccttgagtttggagcaatctaaatatgtaagatttatcaattttaatgttagattttaacagaccacatttttatactgttgaaggcaccaatttatacttattctagtataaagcacatttgccatagcaaaacttaacgtttgaacaggttctcgtgatacgtaggttaaacatgaaaaattccaactttattccccaagaaggtaggaatcccttagtcttggtctgactgtattttacattattttttttcccccggaaattgagatatttgaaaatcttttcaaacagagttttaaagcaaactcatattctgaaggaaagtttctctttccctgtgattctagttattttctatctgtcattcagctgtggataagtcctagtcttacttaatttttaaaaaatatttgaagatattttctctagtaatggattcactgaaaagtaggattccaagtaatacaacttattaaatggtaaaagaaacaaagagaaatcaataaccaatataaaagattcttcaacaacaaagtaaataatcaaacattaaaattcaatgtgaggctaggaatgaaacaggaagctattctatactctaggagaatctgtctgctgctcatgtcaatgaaaaaattctaaaaagcaatgtcctgaggtggcacatcattcaggtaaggtgagaggaaggaaagactcacctttaaaacataggtactacattaaaagaacaagaaattcctgaacattgggagaagctaaaaaaattaaaataaataaaagaataacaagggaaattctctaattaattttatatacatgtatgtatacatatagcttgtgtgtgtgtgtgtagcttccaaaggcaaactcaggataaagggtatctgttagaacagaaagtacagagaagagtccaaaaattataataatttctactggcagatgaataatatagataagaagcagttctcagatataacaatttatattaattttatatagtgaaactaaacgtctaatttccaaaagtaggatgattcattttgcagccagtcctaattctgctcttatgtactttctcattttccttttctcttcacacttatggtcaaaggtgaaagttccttgcagttctcccacaccttcctgctttaacagaggatctgtgatcctctattaaaaaaactctgaatacgtttccaatttcctataatattcatctaaaatgatcatcatatccaaaagtttgctaaaaactaaaggactgaagttaagagaagctctagggacacaaggctatggacaactaatctttcttataccacaattctctgagagaaggttaaagagaatgggttaaacaaacaatggtattgttcctattgcatgttcaacatagtttttctcatttagaccttacagtaattaaaggggtaggtattatctttgattcagagatgaggcaatgacattcactaaggctatgaccctttcaaaaggaaacacagatgtgaatctgggattcaaacctaggtctgactataaagctcatgcatgtacttttaaccaagccttccaggaggcagcagagggagtgaaatcaataatgccaaataaatgtaagttatcatcatcattccttagggcgaagtacaggaaggagatgcatctagagggactctgtacgatctgctggacctgggactcatggggaaaagggtgagaagattggcagtggtgaagagaagacatgaaatggagaaatgcaatcagatatttctcagaggacctgtgcccagatatagcaggttccaatggatgaaagaatttcctgatggggcaaactgcattatcccccaagcagttttgaggactagacctacagcagcctaagttctgaaactcattctcactaaattggacaataactgcatcgatctgtgattttatgagaaaaacaaggtgctagaagcttaaaacataggtagactgataaaagcaatactctaacattggctgacagctcaggctctggaggcagaatgctcgggttcaatctgtggctcttccactcattagctatacagtcttgtgaatgttatttaaattctgtgtttcagtttcatcatctgtaaaaatgggataataactgtacctacctgaaaaggttgttgtgtgaggatgagatgagagaatcctggtaaagcaattagcactaagtttgacatacaataaatcaattcaataaatatcatttcttattattatgttgacaataacattttttctgttttactaatacaacagtactatcatgtgttcctaatatatatgatgctttgtgttttttatcctcaagacttgaactgtagttagaagtaaagtaagttggagaggcagccgagatttctgagataagctagacacagttcagaggtatactctgagcctatggccgagccacttacctttctacctagtcattttcctataaagctctgctgtttggccggacacagaggttcatgcctgtaatcttagcactttgggaggctgaggcatgtggattacctgaggtcaggagttcaagaccagcctggccaccatgatgaaaccctgtctctactaaaacataaaaatttgccaggcatgatggcaggtgcctataatcccagctactcaggaagctgagatgtgagaatcacttgaatctgggagatggtggttgcagtgagccgagatcgtaccactccactccagcctgggcagctgagtgagacgtctcaaaaaaaaaaaaaaaagaaaaaaaaaaggataaaaaaaaaaaaactctgctgttcataaaatttaggcttaggagaatcatcttatacctgaggctctactcagtgacccatatgtaataagaacccatcatcattctctcactctcatagagttataaatcccttaatggaaaaaaaaaaaaactttagtaaagaaaatgatcccctctcaatacccccctccacacacattcagaaatctcttatcctttcaggtttccttcttttaacagaacttactttcactcttaaagtggggaacagtcatggagatgatgggctatcaagcagacgaaagaacagacagaagtctgaggacactgaagagaaacctcacaattagctaccctgtttcatttacctttaaacagcatgtcccaggcaaataaaacctatatgacagaggtgttttccccatgttttagctgaacacaactgaacaaaagaaatcggactacaactagtgcttcaccagatatatatatatatatatacacacacacacacacacacacacacacacacacacaccacacacactttttttttttcttgaggaaacagtgtgaaaggaggtgatgacagagctaagggactataatattctaacccaagttgctaatgtgtcttctggattttatgtgagtaaagtttcccctagaatttaaacaactgatttacaaataactataaatttaattccccccctttttgtaattagggaatgaaaaagatataaactggcatttggccttttattcagaaaaatacgtaaatattttataaacggtcttgttacccacatattatcttgatgattctagttctatcctacagttacaaatcacatattttctttctcttctaaataatttcaatatatgaagactacagtatataaaccatatgtatcttattcactgaatcataaatgattacataaataatcaatacttaataaaaatgcagcctataacttcacggcatctagcagatatctggaacctacaacaaaaagacaaggcattttagaacaaaattgagtacgtggagggggaagatgtctggcaataacctgaattcatctattcaaacacaggtctgcaaagaaagtaaagactctttggcagccaacatttaatattacgacttaaaggctaatttgcagatcacatagcaataaacagctattagagagattaaatggtctaagtaaaataaagagcttatcttttattgtaaactaatagtcttcttcattcactgaaagaaagaacatctgagttcttacaaaataaagctcaagaaaaaaaatcttatataccctaagtgaattcctacaagaaatgaggattggagggtatgattttctcgtaagaattcatgactagaagccataaactgtagctaaccggctatgattcctctacatcctacaaatggtagacatttcaaaaaggctcctttaagacataaagacatcaattattccctaacggcatcccaagtaaaaacaggctgccaacagtcagcatgctggcacagcaccaaagactgtgaattttaagcaagggcagtgaaaagactgagtatcttgagaactaggttcttaatgactggaggtggattagttaaatctgttcaagtaataagggcagggtagaaaaaaaatggcctagtcattatgattcctttggtatttatggtaataaacatgaatcatgatgaactcactggctattaaacgcagaggtcataagtacttcgataggatttccacaggaattcaccgttaattagctggatcattatttgaaagtgttactgaattatcttagcatttgtgcagccattcccctcaaattggtcattcccagctgagggcagttaatgccttaacaaactggtcattaactccagtaactgattttgtgggaattattgcacttataaagtacattcaagagtttataagaaacattgcatctttttttctttttaaagaaatttacagctgtagttcagctggagcagctgaaggagaaaaaactatcagctctctgggctgctctcacaatcgattttctgccaattaaagggcaaaacacatgctgatgggttttgaattttaaaatgtcttcagttttttcatctgtgaagtgatcagtaaaaacaccattcaattactaattttgtaagacacttgggatttttcattcacagttcagtcaagcagaaatacgagttctgaacatgagaactcaaaagccaaatttccgcttctgcagtagatccagcccaacactgtgaaaacaaagtgagaacacaagttatgggccacattattagccagattctcattcccttctatactctatgtcttcttctttcaaagtggaacactccctttgatgtcacagaggctccatgaaaagataatagaagtgggaatataagcacacctatattaggatagaatagcattaaggtgatatattacccctggaaagtctatatgaatacaacgtgcttcaaaatttgcaggtgtctttacatttattacggagtgagagcccctaaagttctatcaatacagtgaaaatgccacaggtgaaaaccaccacttaaaagataattgcaacaattattgaacatgttaactacacactgacatagactaaaaacacattgaagctatatcagaacatctttgatacatgtttccatataattttatgcttaacttattagagcatatactgcagatatatactcaatataaacagatagccttagtttaaacttgaatttgcacagaccaatgtttaagactgtaactacattggatgatctcttttataatatatttgtctatagtcgagatttgagatgaacagataaaaaccaacagttgttaaccaacagttaaggggaaaaaataacataatttataggttacaaagatcagtatgaaaacattaagtacaacaatagtttctgaggtacagtggttcacggataagtaattttttatgtccaattatttaattttaaaagtatgagaaactaacattgcagatctaccagtaagctaaacattgtttttagagatagtcactaaatgagtactcttatatagaacatttttgatagattttcatttgttttagtatgtacaactgtacattttgccacacagcttatttttcatcatatcttcaattattttattatgtcttctgtagaatttttattacatccatagaatacaagttatttgcaataagatctaaagaatacacatacttgtggtacaaatgataaggatcaaaataaagcccttaacaatgactgctttctagcctgtatgtccaaatcattgacttaatatgctttggccaaattttaccatctagaaatggagacaccctaggcaatattcacacacacacagtattggaaccagctggtgacagaagaatcttaagaaaaaaggcttcttgatttaattgggaaaacaggaggaagcataaattttactgccattaataacttcaagcaatcttgatatgagtctacctcaccctgacggcgagacatgtgctttctgttaaactgtttgccacttctgacccctattgtttgctcacttgatcaggtaagaaaatgtaggtttatttataggataaatgaggcctattaaaattgagaaacagtgtagtagtctatgaggagttgtgttctgaaacagatgtgtgaaattccataacagttcggtaataaacagaacaaccaaaccaatttattttttaaaaaatctactttaagtttcttaaagaaactatcataaaggcaacctagtttcaaaaaaatggaaaacacttcattttgcttggaaatcattattctgaccatttccaaacagtttttaataagtcagaaaaggcaaaatgttgctttcttcacaaaataaagtttcattttttcattctttatgatgctgttggtaaattaaaagttagatcatattaatataaagtaaataagtgaatttaaaattgtggaaaaatttcaaaggtgttcagaagttaactttgtcaattttcttttaaagacatatgacagaatggtcaaaggaaataacccttagtttttatatgatcaaagtttagagttcaacagtatctgctctggtgatctccaaaaataagggaaatcagacttgtctaaaccggaagaaatcaaacatttgtcacttaactcttgacctggtctgactccttacatgctgatgaaactgttctacagctctgtaaaatgccccaaacccatattacctaaatgtaatctagacaaaaatgaatcaggtgccattcttactctcaaaatcaattttgggtctactcacagaatagagaaacatttatatcaatatggaacaccttagaaactctaatttgtcttccaatgaagacaatatggtctaacattactgactaaaaattagaccttttgaaattattcacataaaattgtgaaacaggcctgatgtgctattgaatttaggagtcccaattttcctgtcataaccaataacattagtttctgcacaagccagccatgcaaactggcacagatttaaaactcttaaagttagaagaatcaaaatttacacaggtagaactcagaatcaaaatttaaatgatggctcaaaccttcatactagtagctttcagtgccatacgtttatcactgaccagggtggctctgctgattaaaagataactttaagaaatatgtcagagctattaacttttttagttaatttgcataggtttataaattatatatgaaaatgcttaacacaagtacaccagatgaatattcacttattctaagtatagaaaagcttagcaacatctattggtaacactactaattcctcagtttttaaggatgagaaacattctcatctctgcttataaatgagctaaggaggtatcccaaggcagggtaattctgtgatactgggttctaattatatggacttctgaatacgtttaaagaacagtttactaacctaggattaagactgccatttcatctatttgaacagtggttctcaaactatctgtggtggtgagccaggttttttcatttcttcccctaacatttttattaaagtacaataaaaatgaaattaaacaaaagatatataaaatagaagatgcaaatttttattattacattcagcagacaaaatcttattcagtcaaactgctatatgtgtctaagtgcttactttcaatttttggacttactcattatagaccagtaacaaccaataacaaatagaccaagtattgctctgtggaccatactttgagtatcactgtattagaagattcctgccctgaattcactgatacatgagaaagctataaaatataagtgaaattaaggtgctatttcaatgtttaaaacaaaccctctataacaaatcctcccggccgtgtgaggtgtcagtccacacctactggggggtgcctcccagttaggctactcgggagtcagggacgcacttgaggaggcagtctgcccgttctcagatctcaagctgcctgctgggagaaccactaatctcttcaaagctgtcagacagggacatctaagtctgcagaggttactgctgccttttgtctgtttgtgccctgcccccagaggtggagcctacagaggcaggcaggcaggcttccttcagctgtggtgggctccacccagttcgagcttgatgggacgtattcaaaataataagagctatctatgacaaaaccacagccaatatcatactgaatggacaaaaactggaagcattccctttgaaaactggcacaagacagggatgccctctcttaccactccaattcaatgtagtgttggaagttctggccagggcaatcaggcaggagaaggaaataaagggcattcaattaggaaaagaggaagtcaaattgtccctgtttgcagatgacatgattgtatatctagaaaaccccattgtctcagcccaaaatctccttaagctgataagcaacttcagcaaagtctcaggatacaaaatcaatgtgcaaaaatcacaagcattcttatacaccaataacagacagagagccaaatcatgagtgaactcccattcacaattgcttcaaagagaataaaatacctaggaatgcaatttacaagggatgtgaaggacctcttcaaggagaactacaaaccactgctcagtgaaataaaagaggatacaaacaaatggaagaacattccatgctcatgggtaggaagaataaatattgtgaaaatggccatactgcccaaggtaatttatagattcaatgccatcgccatcaagctaccaatgactttcttcacagaattggaaaaaactactttaaagttcatatggagccaaaaaagaccccgcattgccaagtcaatcctaagccaaaagaacaacgctggaggcatcatgctacctgacttcaaactatactacaaggctacagtaacgaaaacagcatggtactggtaccaaaacagagatatagaccaatggaacagaacagagctctcagaaataatgccgcatatctacaactatctgatctttgacaaacctgagaaaaacaagcaatggggaaaggattccctatttaataaatggtgctgggaaaactggttagccatatgtagaaagctgaaactggatcccttccttacaccttatacaaaaattaattcaagatggattaaagacttaaatgttagacctaaaaccataaaaaccctagaagaaaacctaggcaataccattcaggacataggcatgggcaaggacttcatgtctaaaacaccaaaagcaatggcaacaaaagccaaaattgacaaatgggatctaattaaactaaagaacttctgcacagcaaaagaaactaccatcagagtgaacaggcaacctacagaatgggagaaaattttcgcaacctactcatctgacaaagggctaatatccagaatctacaatgaacccaaacaaatttacaagaaaaaaacaaacaaccccatcaaaaagtgggcaaaggatatgaacagacacttctcaaaagaagacatttatgcagccaaaaaacacatgaaaaaatgctcatcatcactggccatcagagaaatgcaaatcaaaaccacaatgagataccatctcacaccagttagaatggcgatcattaaaaagtcaggaaacaacaggtgctggagaggatgtggagaaataggaacactttacactgttggtgggactgtaaactagttcaaccattgtggaagacagtctggtgattcctcagggatctagaactagaaataccatttgacccagccatcccattacagggtatatacccaaaggattataaatcatgctgctataaagacacatgcacatgtatgtttattgcggcactattcacaatagcaaagacttggaaccaacccagatgtccaacaatgatagactggattaagaaaatgtggcacatatacaccatggaacactatgcagccataaaaaatgatgagttcatgtcctttgcagggacatggatgaagctggaaaccatcattctcaccaaactatcgcaagtacaaaaaaccaaagactgcatgttctcactcataggtgggaattgaacaatgagaacacatggacacaggaaggggaacatcacacaccgggaactgttgtggggtggggggaggggggagggatagcattaggagatatacctaatgctaaatgacgagttaatgggtgcagcacaccaacatggcacatgtatacatatgtaacaaacctgcacgttgtgcacatgtaccctaaaacttaaagtacaataataataaaattaaaaaaaaaaccctgtatacccaggtctagaaatactcaaaactgtgaagaaaactgttttctgtgtccctgatctctcatttggcaaccattagccccctcgagtctttcccttccttttctccctccttatcatgactaacatttgtatacgactttctagttatcaagaaaatatatgtttattctctcatctgattctcagaacaaacctattttatcagaataggacctattttatcccctaactttctaaataagacgaaaggttcagtgaagatcaactgacttgcctaaagtcactcaggtaataaagggcaaagggaagactcaagctcagctcctttgatgttccttcctttcatgtgttcctttcatcctttcatgcattcatccctctaaccacccaccaaatatttattgagaacatacaatgtgctagacattgttctaggtattaggagtaaagaagtgaagtaaagaagtgccatgctaatggtggttcaatattattcatctgcctcttcctacacattggctgagactgatggaactccatattgtcatagagcttatgttgctggggcctggagggtggataggggaggtgggtggtgcacaggtagtaaacaagatgattacatggaatttatatccaatgatgattaagtactatggggtagcagctatattttgaagatagagctgactggattcctaagagtttggataaagcacaggagggaaagagaagggctgaggataactctgccagttttggtccagttaactaaaagatgaagttaccatttactgacatgagaaagacagtgaaaatagtaaattgaggtgagggtagggcagagatcgggagcttaattttgaacctgttaaatctcagatgctaataaggcatccaaggagtaatatctggaccaacaaaatcagggaggaggctgagattatttctattgctatttagaagacatccgtataggcagagtatttaaatggaatgaatgaagtcagcaaagtagtaagcatagataaagtccaaggactaagccctgggggcattctaatgcttagaaattgtaaagaagaggtggaagcagaaaaggagactgagaacgactggatatttaggaggaaagctattaagagtactgagtcctggaaaaccaatggaaaaagttaaagaaggagggaactgtaacaaatactgctcataggttgagtaatatgagtactaggaattgaccattggctttggcaatgtgcaggtcactggaacttgaccagagtagtgtgatggggtgtttgtgtgggaggtgaagggtgggagtgacagcctgattggaaaagattcagtagtgtgtaaaacaatgaggggaggggacagaaagaggagagaatagaaggaagtgggaagagggagacagagagggagatgggcagatagggaaagagaaacagaaagagataaagaatagggagagagggcatattaatatatatgaaagggaagagggaaaatgaagacaggaaatgaagataactcttttgaggagagttgaaatgggaagaaaagaaataacatggtaactagaaggtaaaagaagtgacagtgaaaaataatctattttacaattgctacgaagagaataagacatctaggtatacaacttaaaagggatgtgaaggacctcttcaaggagaactacaaaccactgctcaacgaaataagagagggcacaaacaaatggaaaaacattccacgctcatggatagaagaatcaatattgtgaaaatggccatactacccaaagtaatttatagattcaatgctaccccatcaagctaccaatgagtttcttcacagaattagaaaaaaactacattaaatttcatatggaaccaaaaaagagcccatatagccaagacaatcctaagcaaaaagaacaaagctagaggcatcacactacctgacttcaaactatactacaaggctacagtaaccaaaacagcatggtactcgtaccaaaacagatatatagaccaatggaagagaacagaggcctcagaaataatgccaaacatctacaaccatctgatctttgacaaacctgacaaaaacatacaatggggaaaggattccctatttaataaatggtgttgggaaaactggctagccatatgcagaaaactacaactggaccccttccttacaccttatacaaatattaactcaagatggattaaagacttaaacgtaagacctaaaaccataaaaactctagaacaatacctaggcaataccgttcaggacatagacatgggcaaagactttatgactaaaacaccaaaagcaacggcaacaaaagccaaaattgacaaacgggatctaattaaactaaagagcttctgtacagcaaaagaaactatcatcagagtgaacaggcaacctacagaatgggagaaaatttttgcaatctatccatctgacaaagggctaatatccagaatctacaaggaacttcaacaaatttacaagaaaaaaacaaacaaccccatcaaaaagtgggagaaagatatgaatagacacttctcaaaagaagacatttatgcagccaacaaacatatgaaaaaaagctcatcatcactggtcattagagaaatgcaaatcaaaaccacaatgagatatcatcttatgccagttagaatgatgatcattaaaaagtcaggaaacaacagatgctggagaggatgtggagaaataggaacgcttttacactgttggtggaagtgtaaattagttcaaccattgtggaagacagtgtggcgattcctcaaagatccagaaccagaaatagcatttgaaccagcaatcccattactgggtatacccaaaggattataaatcatgctagtataaagacacatgcacacatatgtttactgcagcaccattcacaatagcaaagacatggaaccaacccaaatgcccatcaatgatagactggataaagaaaatgtggtgcatatacaacatggaatactatgcagccataaaaaaggatgagatcatgtcctttgcagggacatggatgaagctggaaaccatcattctcagcaaactaacacaggaacagaaaatcaaacaccgcatgttctcactcataagtgggaggtgaacactgagaacacatggacatcacacaccaggacctgtcgggtggtggggggaaggggcaggaatagcattaggagaaatacctaatgtagatgatgggttgatgggtgcagcaaaccaccatggcacatgtatacctatgtaacaaacctgcacattctgcatatgtatcccagaacttacactataattaaaaaaactttagttaatattttaaaagctgacataaaaatttggaacattacttaatttaaaatgtacaataatatcacacacaacagaaaaaaaagtgtgaataaactcaaaaattcagaattgtccaaaagagttcaccagtgaaatgccacttttattattattattattatgtatgcactctgtaaaacactgccatctgtcactatgtgatgtttaacttttatccaagaatgaaggcccttccaaagaacacatttcaattgcgtattttatgcttgctcttgtgctaaaaccatcctcaagcatatcaaacaatcctcagcttatgaaatctctaaaccaaagcaaatgagaggtgcaacaaaatatatgcatgatgcatcagacaaaaagctaggaaaatttaacttttcaagttacttttgaaacactatcagtacatattctagggtactgaagaatacactatgacaaggaatttccttgccatcttccaacccaggatagtctgacgtaaggaagcacccttgagacatatcaatgtcaaatggcttaataagttttgacaaggaaaaaaatttttttgaagatctgattcttggataagccaaaaaaatctttaaacacttttaaaaacgtaacactataaaaatccccaaaaagactgcatctaacaattaagtaaagccaagttttgtaagtccaattcaatttgcagataatcacatttgctgaagccaatggctatgatagatctcccagatggtagcattaagttaccagacataagaaactatctgtcaaagtataggaatgatagaactgaaatgatttataactgatactgaactaagcagaaataaatttagtatccttatgaaatctcaggaaaataacattaaaaaataagaaacgaataaatttggcaatatttaagagaaggaaaacaaaggaatattcatatataaggttttccatggaaccaattaaaattttagattttctgcactcttagggaaagatcaaaactactcaaacaatttcagcatgagatagaaaatttaaaataattatttataatattctttacaaatccctttttgtgtctctggtgttaatagaaaaagctaaaatcaaaattcttaaatgaaatgctttatgtgacaaaacaatattaaaataatttttggttctattgaattacagtttcccttagagccttccatggaaaaagggctgagctataacacaatttctcctttgcctttaattattcaaatcacagaaccttaattttatatatttttttcagtttgttttccaagtaaactttgagtgaagttattcagtcattaacaccaatctcacaacagcaggggtcgcaatgtactagttaaatgtttcaggaaactgagaagcagattaactgttcatattgcatagatttattagagcatgaaagattcacaactcattgtactctagtgaaaataatctatcattaaatataaaaaagatttttctgttgtgggggtccccaaattataataaagaaaacctgcttaaaagctgatagcatttctagttgaaacagcataaaaatcacttatgctaagttctaccatgtgcattagctccacagagaggcttctacacctcttaaaaaataagtaatttctatatatgaaataggtaattctttaattcagtcaactgtcaacttgaacatatatcaaacagtgagtttatttctgaagaaaaaagcaaactgaccattcatgtctactgcatacttttaaattcttttctccacagtgaagaaaatgtaccccaaatactttaaatatttgatttacagaaggtttctgccattgaatttctttaaattttaattccatgtaaatcactccagttatttgccaaaaaataatctaaaataatttagattgtctactatttaacacattaaaaatcaactaaaaataaaacttaaaaaaatccatcagaaacagtgatatttctgaaggtttgaaggaaaacaagtctaaccacctcctctagttcactatctttcatcaaaccaaccaggaagatcaaatcaatgagtagctaataactagcataaaaaagggaatacagtaaaatacaaagtgtccattgcaaatagaaaaggtaaatactgttttgtgaacatttttgtttaattacatatattaaacaaatgtttaaatatatatcaaatataatatgtaatatatagacatatattgacatgtgaatatacatgtatataaacatatacacattacatacacatgtgagggttgggctacactgtaaaatacatatttaaaataatatactttttaaccttaggaaaaatatatcttactacggattgaggtaaaacaagtgtgaaagtcagtgctctaaataaatttttcttgtccttttcaaattcatgtcctttataacacagtttccttactatatcttttgtataagcattgtagccaaagaccacatatgttaaatgtatcactgaattactcaattgagaagtttagcttactgtgttaggagttaatgatttaattgtctacacatgtaacatatatattaacaaatgtaaaaatgaccattctagtaatatcatgaaatcaattatacactaaatgcaatttctttgaacacagcagagagatacaattaagcaaaatcagtttcttcagagtcaaaagaaatgttacaaggtccacacaataaaactcaagaacattactaggaatagaacccttggggaactcatttgtaattcattttttaaaaaatatacaattcaaataagttcagttgtcagtttccaagaccacaagagaatagaaatagattattatagaaaagaaaaattgctgctatagaaatgctgctggtacagaagaaatgtgaagtgacagccaaggccaggggaaaaacagaaaaattgtatataaaaatgaaaaatacatggcgttctggggccatttagcaaggagaaatccttgggcatggtaataatatttatggccctgtataataaattatcttcagacttgcaaactttaataaatgatagtaagaacaataacagctacacacattatagcctttgaacctagggactctggctccaaatcccatgcttttaaccactacactatactgcttctcactaaaatttaaaattacgttcaagatattaaagtaaatttaagaaaatactttagaaaacaaagatgtaattgatttttaaaagacattctgctataaactgaatgtctatgttcccccaaaattcttatgttgaaacataatcttgaatgtgataatatttggggctgggtcctttgagaggtggttacgtcatgaaagcagagccatcatgtacgggattggtgcctgtgacagtctgttggcatgctgctaatacagacatacccaagacggggtaatttataaagaaaaaaagactggggaggcctcacaatcatgaccgaaggcaaatgaggagcaaaattacatcttacatggtggcagacaagaagagcttgtgtaggggaactcccatttataaaaacatcagatctggtgagacttattcactaccatgagaacactatgcggaaaatgcccctatgattcaattatcaccacctggcccggcccttgaaacgtggggattattacaattcaaggtaagatttgggtggggacacagccaaaccatacagtgcctttagaaaagacacctcaaaggctccatttccccttctgccatgtgaggacatggtgagaagacagctgtctatgaaccgggaagcaggccatccccagagcctgcatctgttggcaccttgatcttgaactttacagcttccagaactgtgagtaataaatttctgttgtttataagtcacccagtctattcccttatagaaacctgaacgacctaagataactgtgtatgaaatgattaaacacccttaataatataagcctggagaacttatcaaaaaagatcctttctagatatctagtgttttgggattctatgtatatttcttttgatgataatttcacatatttgtaattttgtaatattgcattatctcatttaacttttccctattcatatatactattattatctacatactgaagatgagaaaactgacatacatatatatatatatatataaaatacatatatatatgtatattttaggtaattgcataataccacataactggtatctgatgaagccaatattcaaaggcatatagcctggctccacaatcctagctctaatcaatgtgctctggaataccacagttgccagatggactacgtcctgtaggatttgctacgatgtgtcaggacgtgatatttaagagattctggtaatcctgaaaacccaaaaataactttcaggatcaattttcttgctcatcaatgttccagttctactcattccaagcatttgtccactcccttgaagttaggcatggcgatgtgatttgcttttatcaacagaatgtagcaatatgaatttgtcacttcaaaagtggaagcctttaagaaaagcatgcaattctccatatccctgttccgtcacacttctctatttctgttcctggtactagcattctaatagtcatagattttatgacatctttttctatcatcacccacatccaaacagtaactataacattcatttcacctacgatatatcccttctgccctttccttttgcctcatactggacatactacatcttctctaaacgaggttttctttacttcttgtcttgcctattacagcaggctactgatctcatcttcagactctaatgtgagtccatcaaatagaatacatcagattaatttcccttgagcagatttctgattataacctaccgagctcaaaagtctacaatgatccccaccatcagttgtaagtacaaacttcttagcaatgctttaaacttcataataccacttaagagcataaatccatttttctaaatgttatctttcacttattcttagtcatattctatgctcaagttgaaatggcaacttattgttcctcctactggcctagctctagctatgccttaggtaatgtttattgctttatctgaattactttctatagcctcaactcttactttataaatatcaccctatgaaaatgacaactttttcaatatccatttcaaatgaaatcttatctataaagtatcaatataggaacatcctcttttgaatccctatatatctgtaggttgaaaaacatttctctatagtgcttagcgctgtgctttgctatggtagagtatcaacattttactgaaataaattgaaatgcatattcaagagagtaaattttttttaaaaaaattacctggtttgtcaacaaaaatgtaacacgagaaacgtatttgtactcagagtaacataagtcagcaacatttatagaatgtctacttcataacgatgatgatgttgattagaaaaataacagtagccaatatttactaagaaaatgtgtcaggtactttgcaggcaattcttcatttgatcttcaaaaactctaagttgaatatagttattaccctcatttaagagatgaggaaactgagtaacaaagagtttgcataacttgcccaaggtcacatggttagatgtaaacagtcacagttctaataaaacagtctcgctcaagaaactgggctccaaaggagataaaacattaatttatacattggatattatgtcttatatcccaaaattttccacttgttaacaaattatgaagtgggtatcacatgagtgatttcttaaaaatctcttttaaatcatacattttatcatatgttacaaggcaattatttaataaaagtacatgactagaaactgaacaaaccaaatagactatgaattccttcaggccaatggctgtaaattgtttatcttcatacattgagaagctgacctaataggtgacacataattatgtcagatttataataagtgaaaggtcacatgatttaaattcaagaccaatcaactttactcttaaagttttccttattcctcctcaaatgtctacattgctttggttctccaaaaccaatttttgaaagtgctccttaatagagtaacttctaaaatgtataataacattgttgtgcagtattgaatatatggagaaagctgttaaaaagaatgaaactgcagtactgaaacaaaggaacaaagagttaagacataagtaacaatttactttctggttaagaaaggcaatgcattgcaggtagaggaaaaaagcaggtaaaacaggtagacaggcacttaggcataaaagagcttatttaggaaactgcaagtgtttcagtatggtcatggtgtaaagtatatgctgggaactggcaggagcccataaagatggaaattgaatagattgtaaagagatttaacgccctactaagaaagttagcattatgttgactgcacaatgttaactcttcaactcaccttgtcatagacaggtatcttgctggcagctaaaacaaaataacttataaactgaattctccaatacagtactttctaagtcatgctataaaaaataccctttttagaggctgaggtgggaggatcactggagcccaggagttcaagaccagcctgggtgatatggtgagactatctctattaaaaaaaatataccctttttaacttagtaacaaaaagtttccacaaattagctcatttttaagtagtattttgaaagtatagcagaatataagaacttaaacgatacctgcgttgttttttttaagaaaaatcctgaagataaaatatttttttccttcttgcttccttatttttccttgcatcattactttttggcttagtatggataaatgaagtcaaagggttaaaagttgctattttatttcattccatagcaccatggaaatcctggtacaggtcattttttacttactctgcttatttttattatttagtttccagtcaaagaatatagacagaatgctttttgttcaggaggcttttcaacacagagctcaattttccagcgatgttggaaattccagacaacactgtcattaatttctaaaaagcatacctaggagtgcagtgagcttgggaagcagtccaacttgtaccatcttattcctcagtcctgtgtcaaaggataggtttagtaaaagtcggagggtgatattcagcaggtcttcatgctcacaaggtatcattttcaccagtttttcaacaatatccatttccacctaagtaaaataataatacaaatacagtgaagttctgttgcaaaataggacaaaaagaatataattattttttctttgtttttaccctaatgtatatctgttttataattatatgttaatcttatactccatttcattctgtaaactttcctgaaatcaaacttttgaggagaaaatatatatgccacatcatcccctccttccctcatttaattgcatcaactggaagacaaattacatttgatccttgaaaacactctgcattattgaacaccacctactaagtaccaggccctatgcaaagaagatctcaccttggccttcaaggattcctcagtataaaaggagatgaggctgggcacagtggctcacgcctgtaatcccaacactttgggaggccgaggcgggcagatcacgaggtcaagagattgaggccatcctggccagcgtggtgaaaccccatctcgactaaaaatacaaaacttagctggctgtggtggcatgcacctgtagtcccagctacttgggaggctaaggcagaagaatgacctgaacccgggaaacagaggttgcagtgagccgagatcatgctactgcattccagcctggtggcagagagagagactgtctcaaaaaaaaaaaaaaaaaaaaaagagtagacaaatagaatgaataatgaaaatacaatgtgataaaaactgaatgaatacaatgctctgaaaacagcattgagagaactactaacccacctggaagaacagaagacttcaaattaggaataaagtaaaaaaaaaaaatgactaagaatttgttctctggttcagaaaggcaatggcaatacaagttgaggaaaaagccagtggatcggcatttaggaataaaagagcctgttagggaattgcaagtgatttagtataatcatagtataaagtacatgttgaagactggcagaaggctataagacagatctacataaaatcataaaggcttttaatgctgtactaagaagtttaactttattacacaggcagtgaagtgttctgaaagattttaagtccaggaggtgatgtggtcagatgcgttcctagaccaggaatactcctaaaatccaaagtccttgacactaactaaacaccaacttgtaaaaggcctatttaaaaacagcagtctcagagtccttttctgtatggtcaataaggtagatgtattttctgttaactgacaaatggaaaaagaggtttagggcaatgaaggcaaaaaattattttaatttttgtcatttaatttgagatggtactcagtgaatatttaaaaatcatatacaactcaggagagaagctagactaaaagcaatagttgaaactttaagacagggatcagcaaactatggctagtgggcctatctggcctgctatctgttttcattcaacctatgagctaagaatggcttttgacttttacaattttaaatggttggaaacgaaaatcaaatgaagaatgatatttcatgacctacaataatcatatgaaattccaatttcagtttgataaatatttactggaacaaagccatgctcattttttttaccagctgtcaatggctgctttcacgctacaactagagcagagttagtagttgcaagacagatcatatggcctgcaaaacctacaatattgactatctggccctttgaagaaaaggtttgcaaacccctgctctagaagattataaaattgcattaagagaacttactttatagtaacagaggacacaacttatttagtaagagaagctctgcattcagattttttaaggtagcaatcggaaaactttggttgtaaaaacatctcacgtcttttagttacaaagcaatggcaaaaaaagaaatttgaaaaaaatttatgatttttcaatcaaaggattattttaatttaatcctttaaatttaatttaatcaaaggattattaatcctttgattatttaatcaaaggatttatgattaatcttgctctactttttcttttattggagatctaaaatatttatttataccacccatttcatatttttgttccaatctttcactgacctcataaaaatcacattaataactgagcccttgatatacttttttcctttcactctatgcaaggaataaacacaaattgttttaaattgctaaagtgacaaattaacacctgatttttccttcagacttctatctacactccacagccacactgtagtcataccctagagctgttcattatagagtataattctattgccaaagacttccaaaaatcaaacacaaaataagagctgattctttgaaaataccaaagcaactgataaaccactaatctagaaaaaaatgaccaatatcagaaataaaacagagaaaatcacttcagcccttcagacagagataaaaaggaaacagtaccaaaaattttatgctcctacatctgctaacatacaaatgaattaaattccttgaaagacaaactacagagctaccactcaagaagaaacaacctaaacagtcctgtatctattaaaccaatttacagaaagaaaattccaggcctacatgactttttactggtgaattctattaaacatttatgtagaaataataccaattctacacaaatccttccagaaaaattaaagaagaagggatgcttcccagttcattatagaggacacagttactctaataataaaaccagaccaagacattaggagaaaagaaaactatagaataatgcctcataaacataaaaattctcaaaaataattagctaataaaacttagcaatatatataaaagagcaatatatcatgaccaagtaatgtttatcccctcaatacaagactggtaaacattcaaaagtcaatcaatgtaactcactatatcaacagtctttagactgttgcgaatatgcgaaaaacccatatgattatctcagtaatagatacaggaaaggcatttcacaaaatttaacatccattcatgataaaaagtctcagcaagcaagaaatagaagaacttccttaaactgatagcaagtatctaaaaaaccccactgttaacatcatgctcaatagtgaaagacattgttttcctcataagatcagtaacaaggcagggatagccgctcacacgattcctcctcaacatcatactagagggcatacccagtgcaataaggcaagaaaaagaaataaaaatcatacagattagaaaggaagaaacaaaactttctatttgcagataacacagttgtctacttagaaaatctccaaaatctgtgagagagtcagtacaactaaaaagtgtgtttagaaagtcacaggacataaggtcaatatgcaaaatcaattatatttctatataatatcaaccaaaaccaggaaactggtaattttttaaactgccacttataatggtaaaatacttaggtataaatctaacaaaatacatatgctaaactataaatgatggaagaaataaaaaaagacccacataaatagaaagctatactatattcatggattggaaaaatccaatatggtcaatatattgatcccctcaacagattcaatgcaaccccaatgattttaaaatgtacatggaaaaatacagaatagaataactctgaaaaagaataccaacattggcagcctcttactgcttgatttcaatacttactaagaggctatagtaatcaagagaaagaggtatcaatgaaagcacagacacacagattaatggaacagaaaccagagtctagaaatagaggcaaacatatatggccaaattttcttttttatttttttgagacggagtcttgctctgtcgcccaggctggagcgacgatcttggctcactgcaagctctgcctccagggttcacgccattctcctgcctcagcctcccgagtagctgggactacaggtgcccaccaccatgccaggataattttttgtattttttagtagagatggggtttcactgtattagtcacgatggtctctatctcctgacctcgtgatccatgcaaaggcaatttcaataaggtgcaaaggcaatttcaataaggtacaaaagcaattcaatgcatcttttcaacaaatagtgctggaacaactagacatccatattaaaaaacataaatcttggtccatatcttgtaccatatacaaaattaactcatgtatcatatactaaaacgacaatgacaaaaacctctataaaacttgaagaaaacataggaaaaaatctttgtgaacttgggttagacaaagatttcttaaatatgacacccaaatacagtccactaaattttttttatatgctgacttcatgaaaattaaagacttctgcttttcataggagaatgaaaagaaggcacagaaaagtgaaaatacttgcaaaacatataactgataaacaacttgtatccaaatacaggaagaactctcaaaagttagcagtaagaaaattaagcaaactacgcaacatatatcctctctgttgttcctctaaaaaactgtctaaaagccaggctgatattagttcacatcaagagtaaaataaacactttatttaaataaataatactacctcacaaatagctcagccatctccttattccttttataaataaaactgccacaagcttcaattgttgctaattatatcaggtagtattttccttttggaaaaaaaacagtgtatgcatacactggttgttacagcaaaacttaataaaaaaaaacttggagagtttgttattaagtttttttttttttttttttttttgagatgaggtctcactctgtcacccaggctggagtgcagtgacatgatctccgctcaatgcaacctccacctcctgggttcaagcaattctcctgcctcagcctcctaagtagctggtattacaggtgtgtgctaccacacctggctagtttttgtatttttagtagagatggtgtttcaccatattggccaggctggtcttgaactgctgacttcaactgatccacctgccttagcctcccaaagtgctggaattacagatgtgagccaccacacccagcccgttattaatttgtatttctattgcacagaatagaatgtgaaatatgtgcaattagtcaatcagatgtttaaacactagactagtatttaacacagccttctagtcatgtctttttggttgataaaaacccaaacctgagagctaaatttagtaattgcctcaacatgcaatgccttcaggtctatttctttcttttctttcttttttttttttttttttttttttttgagacagaggcttgctctgtcgcccaggctggagtgcagtggcatgatctcagttcactgcaacttccacctcctgggttcaagtgattctcctgcctcagcctcccaaaaagctgggatagccagcatgtgccaccatgcccagctaatttttgtatttttagtagagacggggtttcaccatgttggcaggctggtctcgaactcctgacctcagatgatcgatctgccttggcctcccaaagttctgggattacaggcattagtcatcctgcccagccctcctcaagtctatttctataacacacaacttattagtatttttattaaacagtcaatgtaaagtgaggttttaccaacaatctatcagcaagtttgtttcagcctttagttgcacctttctcagtgtttctggaaattaacatttaaaaattgcttattgttaatcttactaaaaatgtctttaaaaaaaaaagacctaagatatttttcccaggaggcaaagaagaagagtaggaagttgagtatctctctagatactctaatttgcttccttaagcaaattaatgtctctggtcctctcctacttcatctgtgaaattgggaggctagattcactaagtctggccttggatttaaggtccagtcaaattctaaaaatcttgattctacagatgtccttaaataaagtgtatttctttcacaataaaaggtaaaatccatatcatctctagtaaaaatctggctaatcaaatacttctcttaatcttagaataacaaacttttctgaacctcagtttttcctcaataaaaaatgaggtttaatgagataatttatatcatatattccaattctatgatcttaccagaaaataacttttaataatagtcaagatctttttgatagaataaacacataattgtattagttaaatctaactctaatacatacataatagatatatgctgatacaaatcactttgaattttgaaaacttactacaagtgaacttactttgaccacataaatggaagaacataccttaacttatagcaaggggaagcaattatttagccatactctaactactcaggactgtttatatactaccatcttatcatattcttcttagatataagtgaaaacaaaaaacatgtttgattaatctaagaatattcaatcccaaaataatatcaggcacatcatgaacataaatatatactgataatgaaaatgacagatactaaatatataggggaaaaataaaatttcataaattcaataattataattcaaggtacttattaaatctgataaataagtctcaggttttcaaagggcctgccatatcattcactatagtattagctacttcctagttcatttgattttaaaataaaatagagtaggtagacatactatacattcagactatctaaaggagaagccacttttgccagtactacacagccacataatgatacatagttctaaaaattatcctcaatggagttaaggtcaataatccaataacttcatttataggaaactgctccaagaaaataagcagaaatatagacaaatatgtatgtacaaatatgtgcagtgaagaattatttgtaatagataaaattgtaaacagctcagttatctgaaaacaaggtaggttaatatatgatatattgactacattattgtacataacaaagactttttaatgacatggtaaaaagcagatgagaatttatattttatctttatatatttctatactatgtatattctacacaggtgaaaatgatatatgctcaacttgtattttccaaggatcattgtatcaacacagtaaaagatggcaaatgaaagcctagtataataattcaagcaagaaataaagaaggtatgaataaagagggtatcaattaatacaatggcactagaatgaaaagaagaaatattacagtttcaagagatttttaagaaacaatcaacaggttgtggctgccaagtagaacagcaggtaacaaagaagaattgtaggtaacaaagtggaagtgtaggtaacaatgaagagatctggctaaattttaattccacaaactaaagtcagagatgcagaaggcaaaatagcttagggtaaaacaacaagaccaggtgactctgaagtaaaattttaaatttaaacaaactttctatatattatgtttaatatggcaagatccattctatatattagaaatgatttttattcagaaagcttcaatcacctggaatattaactaatatggaatacatttcttaatgaagcaatatcagtgagttattgctattataaaatctttattcagaattatctcggtaggggaataaagtgtttaatttttttcaaaatattctaacttgaaaatggcaaaaatgaactatttcaagaaaaagctttgtaagttaccatatcatttttattctccataaaaatgctgagtttcttcaagaatgacacaactaaaattagcagctcaaaattgtcccgatcaagggctttcaccaacatgtgaactatgttcttgttcctcattttcagttcggtacgagtatcctcagcaagattcagaagcaaataaagagcaactagaaaagtaaaatatatgagagataaagaattagtatactgaattaataatttagaaaatcatttctactcaccaaggcaacagagatagccctaaaaaggtaatatattattttgaaaattttaactggttaataattggttaattaaaaaacatttattgttactgaatgggatatgtgtttgtgtgtgtgtgttatctaaaacaaaacacacatataaaataattcatacaatgctgagaaggacacaataaccaaaataaaacaacgattcctgccctcttggagcttagagtttaatagaaatcaaatggcaattaaaggtagataagtcaggaaaaaataaagcagacagaggaaaatagtttttacacatatagaaaacaagataacatatcataaaactttaataactaaagtctgctgtgttaaaaagtgcaataatccaaaatatacagtatagctacagctaaatttgagcctactaaaatcaacttttcatatgcaaactgattttctgttagtcactataagaaaagaccttatgaaattcagtaatacaattattgcactagacagagttgaagccattgtttgctagttttaagtaaaatttctttcagatttgtgtaataaaaatgcttaggttctcaaaagaaacatttgctttttatagtgaaaatgatattaatagataatgctttccatttttccttgattgacagtgagcttcagagttcaatttctgtaagaattatataggcttttatggtcaatatagtctttttgctctcttgtggcctcattgttttagtatttcacttcatgtattcttgcaaactacctctcaacacttatgaaaagaagaaatacatgcatatgtatatacataagtagataaatataaaatttatttatttaacaaatattagagatggaaagttaaatcacacttattaagtacctattgtatgccaggcctgttgatgtataaaggctgtttaaattctaaaacagttttatgaggaaagaagtattataaaaattttacagattggaaacccctgattcaaagaaattaaacaactttccctaccatacagctagaaagtggtagtgctaaattaaaattcaagtctatcagaatccaaagctcatatatttacactattacattatgctgactttctatgcaaggcactgtcaaaaggttttagaattacattgaaaaaacaaacagacttctctttacagccaagatagaggtagccggttgaatactgtccttctaaaatttatgttcacccagaacctcaggatgtgccttatttggaaatagggtctttgcagatgtaattggttatggtgaggtaataatggattaaggtggaccgtgaatccaatgagtggtgtcttaagaagaggaggaggtgacataacagagaccgacagagtgggaagaaggccatatgaagacaaaggcagagactggagtgatgtagctaaaagccaagaagcaccaagaattgctgggacccaccaaaagctagaaagagacgagagaagattcttttccagagccttcagagagaacgtgggcctgatgataccttgactttggccttcccccatccagagctatgacagaataaatttctgttgttttaagccacccggtttacggtaatttgttatagcaccccagaaaattaataggatggggttttaaacctttgcctgacaacaccacaaaaaaatctaactgaaatacacaaaacaaagattttcacaatagtggacaccagacaatgaaggacagtaatccctgagagataagaaataaatgagatagtcctatgtttgccctagaatattgccttgagagtttccaggtcacaaaacagtgaaggagaatccaggcagaacctgatagaatccctgagttaaggagatgaagccaagaatccagagacgccaaagagttcacagaaaagagtactgaagaagaaagagctgagcagagagaaactctggagttctaacagaggtctccctcaaatactgagttgagtattgattggagcataggaatttaagtgaggctgggacagaaaaaaatgagaggagtagaagaacaaagctgaaaataatgcctgcttctaccaaccatactggcaatcccataattcatgcattagtgggtagagccctgagaagggtcttacctccgtagtgggaaataactagctttatactaaatgctgcttctgtccagactaacaaattataagattaagatccaaaaggatcaaactgtttccaagtaatttaactatgtccccaaataaaactcaaagatatttttaggaataaaaaagtccacctacaacaatgtaaatttcactgtcttgcttctttttttttttttttttttttttgagacagagttttgctcttgttgcccaggctggaatgcaatgcgtgaccttggctcactgcaacctccacctcctgggttcaaacaattctcctgcctcagcctcctgagtagctgggattataggcatccaccaccaacgcctggctaattttgtatttttagtagagatggggtttcaccatgttggtcaggctggtctcgaactcctgaccccaggtgatctgcctgccttggcctcccaaagtgctgggattacaggcatgaaccaccgcgcctgaccctgtcttgcttctaatcaaagattttcagtcatacaagaagcagggaatataactcacaaggaagagaaaaatgaaccaattgcaactgtccaagaattgacctagagtttaattataaaaacggaacattatgtcatataactgtattccagatcttctaaaagttaagtagagacaagggagatataataaaaaatattcaaacttctatcactgaaaactacaatgcttgagactataaactagatgaaattaacagcagtttagagatagaagaaaaaaagattagtgaaactgaagacataatcacagaaactatccaaaattaaacagacagaaaaacatgacaaaaatgtagagtatcagagaactgtggaacaacttcgagtggcctaatatatgtttaactgaagtccctgaaaaaataataacagaaacatttccaaatttagtgaaaattataaacccagagtttcaataagctcactaaactctaaaaacaagaaacagaaaaaaaaattacaccaaggcccggtataataaattgctcaaaacgaatgatgaagagacaatcttaaaagcagtccaagaaaaagagaccttatattaatatatagacaaagatagcatgacagcagacttctcatcaaaaacaatgcaaacaaggcaacagtggagcaacatccttacagtattaaaaaaagttgtcaacctagagttctaaacccagtgaaaatatttcaaaaagataaaaatatttttaaaatgagacttttttagacacacaaaagataattaaccactggtaaatatgtcctacaagaaacgttaaagtaaattgctcaggcaaaaagaaaatgacagcacacagaaatatggatctacacaaaggaataatatcaatggaaatggtaactctacaaggaaatatataagattattttcttattaaatatatctttaaaataaaattatgtatataaaatgataatgtgttatacagttttttgtttgtttgtttttggcttttttttctgagacggagtctcgctctgtcacctgactggagtgcaatggtgcgatcttggctcattgcaacctccgctcccaggttcaagtgattctcctgcctcagcctcctgagtagctggggactacaggcgtgtgccaccacacccagctaatttttgttttttggtggagacagggtttccccatgttgcccaggctggtctcaaactcctgacctcaagtgatctgcccacctaggcctcccagaatgctgggattacaggtgtgagccacgacatctggccttattatagggtttataacatatgtataagtataataaatgttagtaatagcatagagttgggagagggaagaaatgattgcaacactaagcatgaaatggcacaaaatacttgacagcagagttaacttatgataagttaagcatgtatcacttgtaggtagacaactatgattaaagatgtataatataaaccttaaagcaatcaataaaataacaaaagacttatagctaagctaacaatggaaataaaatagaatttaaaaaatctcaaatacgtaagaaggcagacaagaaggaaaaaggaggaagaagacacatactcacacaaacatgcaaagccaatctaaatgctgttcataaaaaaacacacttaatatagacataaatatattaaaaataaaaggatagacaaatatatcccatactaacactagtcacaagaagaagtagattaacataagaaaaggtagatttcagaccaaaaaatgttaccagccatgatgaagaacacttcatactgataacaaggacaattcatcaatagcacatctacatcctatatctttatgtccccaagaatacagagcttcaaaaatacatgtactgaaaactgatagatgtgcaggagcaataaataaatcacaattatagtcagagatttcaatattactctctcaataatagaaaaagtacagaaaagcatcaacacatgtaaagccttgaacatcaattatttgggaaaaaaataactcccttctaaataacccaagggccaaaaaagaaaccaaaagagaaactggaaagtatttaaactgaatgaaaatgaaaacaggacatatgaaaatctgtgggatgccatcaaagaagtgcttaatgggaaatttatagcactaaatatctgtatttgagaagaaaggtcttgagtaaatgacctcagcttccacttaaacaacaacaacaacaacaacaacaacaaaaaataagagtatattaaacccaaagtaagctgaagaaaaaaaattataaagatcaaagtagaaatcaatggaataaaaaattggtagggctaaaagcacccaatatcaacattttccataagctatggtaatgaagacactgtgctattggcatcaaaaacacacaaaagtgatggatagaacaaaatagaaacccaaaaataggcatgacacattggacaaatggttctgacaaagatataaatcaattcagtagataaaagatagtgttttcaaaagtagtacttaaataattagctatttatatgcaaaaagaatgaagaactttgatccattcctcaccccatatacaaaaattaactcaaaatatattatagccttaactaaactctgagactatacaacttctagaagaaaacatattagaaaataattgtaacctttagttaggaaaggatttcttagacacaataccaaaaccatgatccaaaaaacactaagttggaattcataaaaatgtaaaattctgctcttaaaaagatactttaggagaacaaaaatttctgcaaatcatgtatctgataaatgcttatatccaaaacatataaagaatggatacaaaactatccaatttaataataaggcaaaagttatgaaggcacacttcaataaacataaagagatggcagataagcacatcaggagatgctcaacattaatcagtcactagggaaattcaaatcaaaaccacatacattcatggtgagaatataaaaacaactattatagaaaaacatttggcagtttcttacaaagttaaacatacacctatcctatgactcagccattccatcattaggtatttaactaagagaaaagaaagcgtatgtccatacaaagacttgtagaaaaatgttcacagcagcattaaaattgccaaaaactggaaatattctaatgatcatcaacaggtgaatataaggaaatactattcaataacaaaaaggaataaactattgataaatgcaataatatggatgaatctttaattatgctgagtaaaagacaaaaatgcatacatactatatgatttcatttatataaaactctagaaaatgcaaactaagctaaagtgacagaaagcagatcagtgatgacttgggaatgaggaagaaggcagaaggaagaaggaaagggagagattgtaaagatgcatgaggaaattttgggagtgatggatatgtaccttatcttgattatggtcattatttcatgggtatttacatatgttaaaatttatcaaattatatactttaaaactatacagtttattgtctatcagttatacctcaataaagctgttaagagagtatacaatatttgcataaatatttggttagaaacagagcttaaagttttgcatgttaaaaaagtcaaattagttctttgaaacttttacatgaaaacaattgctttcttgagatctgatgcattttggattatatgctaacacagataatacctattattttctagcatattttaaaatgaacctttgaaaatctgacattttctccaacaggttgaactaaattacttggcttcaaatatttaaaaaactcagtgtagttaaaattgctactaatcttcacaggatgaaaatattttgggagttaacaagtatttccatgtacaaagttagtcaaacaccaataaactacatgaatcatcaaatagtcaagtataaatccggacttaaattcacacttaaaagccccatgtcattatcactaaccaccataagattttacatcttatcagtaaccaagaaaccatactattgaagttttaaatatcttaataaagctagagacaaggaattcttttctattaaacaagagaaatattttaaaatgtttatatcaatttcctaggaaagcaacaaaataattcactttataaaacaagtaagttagggctgaagagacaaagattgatattattgaaaaggtcacacactggattaaaaaatcctttcttaggaaataaataataagtatacaaacatttaggaactaaatggggaaaaatagtagagtgaaatttaaaacattacccatgctaaagacagacgaacttgtagcatattaacatttatagaactttcagctattctcacattagctttacaggtatgataaaaagtgaacaaaacaaatgtatttggagtaagtactttgttgctttcctcattgcttaggaattcatacctcgtaatagctgttcctgttttaccacaagcccctggtactttttaaaggttttttcataatcctttctcaaggtttggttttcagggtcttcatcaagtaaacaacttgttaaggatcatccatactcattgaagcaaaaaaaatctactgataaattctatgaacaatggcactattaaattttatgtgcaactttatccagttatttttctcaccaaaagtttaactaaaatgttatctgcataataactgtgctgtaacagcacttcttatttaagtgctcatggattccctgggagtctttgggtgaacaaacttttttatgtagcccacagctaacatcatatagatatttgaacctcaccaaatacttgaattcccagaaactatatgtgaatattttatataggtgcacaagtctataactttcaacagattatcaagtgggtccacgaaccaaaaaaattactgcctcagaaagtgatttagttactaagaacactggattttacttcagacagatgcccagaatattcaaaggatatagattaaatctaaagcttttgtagcagccttttcagactagagatgccaagaaagaactaacccaaacttaaaggtaaacaaattttaaaaatcacatcttctggtcccaaatcgtcctctggacttcttgcaaaaataatcagttacttcagtatccccaagcatatgagtcaagcatatgaccccagaatatgagtcaatgcagctgaccttgttgaataccacttgtatcaaaatacaaagaaatttaggacataataaaatagcaacatgtcaggagaaatgaccagaattctgatgtcatttttatatcccttcaattaccataatctgttgagtctaagatacattttcctcacatcttaacatctccaaaactggatgtgtcttataatccctgatgtgtcatagtttaattgaaagcatatgttcctctcctcgcacttaaacaatagtgaatcttaaaattaatggtgtctgatacagaaatacaatatgtcctaagatatcagttcttgtcaccaaacaataacaaaatgcaaattcatgattgctaaagagttccactagtggttccctccatacttctccagtttaaataaattttgggtaccactgaagcattcaggagtcttgtgactccagaactgatgtaaagtctctaggattcttgggttgttgatgtagttgagtcactatcaatctagatgccagaagtttatggtatgcatagaaaatttataaacctgaaaagattctaattaagaaaagtcaaagcttgtgtgtgggtgtggattttatagtgtcttggagttccatgtgacaacagtaaaagcctgagagattttgtacacaataacctgaattaacctgttacaacatagattaaattgaagcctcagggtttccagaggccaaaattaatataaaagtaaggtccacttttgcacaaagcagagttaaaaatgtatgatattctgcaaaataggaataaagttttcactttttaaaagacataataaacacttgattcaaaggaaagttaccagcatgcctagttgatctgcaaaacatatcatggttgaacagatatgaataaaccaggggcctttgatctagaagcattgagtttagaggctaaaatatgataaatatcttcaaatatgagaagaattatgatgttgaagagaatagccttattccatattgctttagtatacaatactagaaccaatggatagaagttattggggaatggacttcagtgcactaagcaaaagactattataataaacagaatgctaaaccacagaatgggtgaaataaataaacactgacattgttaaagaggagcctatgtaatagcatttgccagggaagttgcagaaatatttttatatttgtaagataggttaaaacagatacctaagtttcctttcacaggttctattattctataggcctttcaaatttttatttattaacaacagtatttttgcactttcctagaaaaatagaacctttaactaggttcatcaccaaatttacacccattctaatcaaagtcaccttagtactcacacagaagtatataagcagcagtggtgggccaggcttcaactaaccaaaggatcttagtggatgtaatgatgtaaccacttagaggctcacctactaagttacccgacacaactattacctgctccttctacctcattaactaataaaggttgtgaagagacaaaaagtgaatatcaaactgtattcattttgatagtttcaatctacttcttaaccttcaataacacactcctgcattgtttccaagtaatgtaattaacaatttttaaaaaagaaaaaagaacaaaaccatcccacccatccaaaacttaaagcaaaagacaacagacggttcaaatgccactctaaaaggatatcagctttcttcttctttgagagttcttcttgccaaagctcatgtctttttaactcatgatcaataatattcatacacagagctccaattttatagtgagtaataagtccatgaaattgagaaaagctttaaagaagacattttaatatatatttaaaagaatacattttatgggtacaggaaatttgtttttggtgatcactggtacgaaccatgtagaaaataaatttgatatacatattttaataaatgaatatatccacaatacactaggaagacttgcgattataaaattactttaaatatatcacactactcttacctaaaatagttatttttaagaagttagaaagtagacattttttgtaactaaccaccatattaactactcagatattcagaatagatttttagattattgtctaacaaaactaataatgtagcaatactagacatacattttatttattgtataaaactgacatcagagaattcgtaaagtactagtaatcaggttttacatatgttttctagacaatacattaatccaagtatttattcaataaatatttatttgctaatactagcacatttttagaacagaagcagcaattatctaggaattgggtagaaacttttcataatgtcttaataagtatcttctttcttaaggatatatgtgtataaataataaatacaatacataacaggtatgtgtttgtacatacatgcatatatataacaataacatttactgagcacttactctgggtcaggctttattctaagtattttaatttttaattcatttaatccaaaaaactatccaaagagggtgccactattactatccaaattttactcataaggaaactgaggcatgagtgggtatagactaaatgaaagatagaataacagatagcaagacagacaatggaaaacaggaataagaattcagcagtagagcataggcagacacacagaaaaactgagagaacaagtgatctacaaattgaatcaatgacacagacaaagagcaatagagatacagtagcctttttatttaataatttttatacttacctggagaaacaaaaaaagatgtaaattatgtttgtagctaactcgacactttgcttccagtcttctctcaggacccttgctaatgcaccaagggcagtttctaaagaaaaaggagaggtaccgaaacgatcattctccttgctctggtataaagggtgattggttttaaatgtctagttattaatgaataataaagctaagatagaactgggacaaaaagtaggatgcttctttccaatacagacagctacttttaaaactaaaatgtaattttacttaaagatacgtaacatgctgcttcaagtatatactatacacagaagtaatcaaatatgatttagataaagtgacatatgttatggtgacaataaaataattaaaaagcctttcatttcttaatttaataaccttaaattaagaactgtaatcttcctacttcagtactgatttttttctttttaacatctgatttaatgtatttgataatatgaaaaaaacttgaataagtctagaaaaaaatgagcaggttagtagactaacactcgttccattaaagcaaattaaaaaccaaataaaatctatacacagaaaaataaatttaatatttcagtatcacactgaatttatgctagtagccacaaataaaacaaaaagctttcacaaaattaactttcaggtaggttaataagcatttctgctaaaattttctcttgaggaaatgaaaattataaagtaatgacactagtttcaaatcaggttggtacatggcatactaattcttaaaataattaaaatatctgtatgttaaaatatagaaatcataattccactgttcttaatagatactcaggatttacaatagtactttatggactgcattatgagtatttattatggtaatgaaaatgtcccatatttgagctttctggctattcagactatgaacaaaaattgattgtattagttatgaatccacgtagtgacaaattttttagcaaattaaaaatcatcctatgatagcatttcacagtattattcacattcacaatgcagagaacttgaatagtacatgctttgaaaaaaattattttggagtcacataaataggttgacaatgcatattaacagcaaagcctccaaaaagtcctatttaataaataatctggtgtagctttgttcaatctagtaattcccaaaggtatttgaccattataatccagataaaatagtatttctttaaatactagcctatacagaactgttctataatgtcataaatttaggcataggtttagtggcctatttgcaaaattttatttcatttttctccttaaaacagaatagagaaacatctcaattaaaatatagttacaggagttgtacacagtttactgagaaacagctaaaagaaaatatagtttacaagaggtcaaaagacaacacaaaattaatttctacattgaatgcaatcataatcaaaatcccattacgtcttttcacagattatgatgaagtaatctcaaaatatataagacaaatgtgcaagaccagtaaagccaattttggggcaaaagaaagcaatttggaacatttttcctacatattctaaagttcaaatcaaaatacaaaacaacacagcaatagtgtggtattggtatgtatatcatcaaataaaccaatggaacagaaggaaagggaacactaaaacaattccatgaaaatatggaacagtacctgccacagaataagttttcaagaattatctacttcataaaagaatggcaagcatatagcagaaaagacatttgaaatacttatttgaaagtactgatcgacaaaactattgatttgaattatcttatccaggtatttggcaacaaccagaaaggcattctctctcatgtaatgcaaaccagataataaatacatctttcctattttgtttttggcaaatgtataatcagaaaactatgcatttaaaatgattctataggcagggcgcctggtggctcacacctgtaatcctagcactttgggaggctgaggtgggtggatcccctgaggtcaggagtttcagatcagcctgaccaatacggtgaaaccctgtctctactaaaaaaaaaaaaacaaaccacacacaaggagtggtggcacgtgcctataatcccagctactcaggaggctgaggtgggagaattatatgaacccgggaggcggaggttgcagtgagctgaaggttgcagtgagccaaaggttgcagtgagcggagatcgcgccactgcactccagcctgggcaacagagggagaccctgtctcaaaaacaaaaacaaaacaaaacaaaaatgattctatagtggtgttattgagaaaagggtgttaaaaacattctatctccttttcttgttactaccaagtacttttagtgaaaggaaagcaaacacttgatgtgaaattcaatctcaatgaaactgcaaagattaatagctttccctgtgctactgagaaaaaatgaatattggaactttaatttaataaaacatgatatatatatttatgcaaatgtctaaagtttgatcttatatcctacttgaaacaataaaaaagcttcccagagtagaagaaagaaaaggtatagtaccattaatgcttaattttccttgtttacattaaatggtttgtgaattctctggagaatatttaaatgctacactctcaatttaagaaatctgagtaagaaagaaataaagagctggaaaatatatgaagtcttaagttttgtataaataactgtaacttattcctctattataattaaacatgttttatagtaatcaccattcaatagtagttcttccaagttatcaggatttcgagcaagctgcaggatcaaagcagaaccccgaactttgtcaggaatatcttcatataataactcaatatattcatccatgtcattaatgttagcaacttcatcaatctgaaacaaagaggcagaaagtactcatcaacaatgctcaacagatccactgtcaaagaaatgttattttgtgatcaatatactggcctttataacaacacacaaatttccaaagaactcatagtagccatctttttggatatggaaattttagacctttagacctaggactctaatacaaaaccccatgataaaatgagatttatataaactttaaaaattgtctatcaatataaagtatcttaaatgtaatagaaaatatttgtatctactacagtagattaaacaatatttcaaaacgtattacaataagaatatgtaaacatttttacccatcatttatcaaaattaattgtctagaaagcacacctagccaggcacggtggctcacagctacaatcccagcactttgggaggctgagatgggcagatcacgaggtcaggagtttgagacaagcctgaccaacatggtgaaaccccatcactactaaaaatacaaaaattagctgggcgtggtggcacatgcctgtaatcccagctactcaggaggctgaggcaggaaaatcgcttgaacccgggaggcggaggttgtggtgagatgagatagagcaaaaaaagcagaaccaatactttttctctttttcaattaaataatgattttctaccttttcaggtacctctgagttcagtcattttttaaaaataccacatgtgcttaatgtgattgtgtgtattattgatggaaaaaggcaatatcttataatccagtcctctattagatcagaatgcatgcagtcttacctccattccttcaaaaggaggtggatctttaggcttgcttgatttttcttttttctctgtaaaaagatttttttttaataaggagacttaggtttttagggtttctaggtaatttttattttcagcagctgagtttaactctaggtaaactggggatattaaaactaaatagtttatgaaataatctcttctcaatgcataaaaatgttcatatataatccacttgatctaatgaggatatcaaggagagtataaattaataaaatctataactaatcaccaacttcctccttggttaactttttgggtatataaggtatacagtcagacttggcaacaagaagcaaaatagtctgttctaagtatcctctctttcccttcctaattcaaatttaaggtaggaataggaaaatcaataaggcaaagaaaaaagtacgacttgagtaatataaaaactaaaatgaaaattaacaaagcagaaagaaaaaaaaattggtaaatttaaaacctaagatatagaatagttgctaactggttcttttttaacaagtaaaattaagataataaattaaaaggcaaacatttattacgtgtgttaattaaatcctcacttattcccaaataaagaggtatccaaaggtgttgaacacaagtttgagccattcgtttatattgaattatctgattaatggcataatttcattttttaacaaaaaaactatcaaatatactttatggatctggatcataagtctaagtaatgtatgtaaattaaagtaagttagaatgttatcaaaatttttgattccacaattagcaaataaatatatgatagaattagtcattattttcagaggacagcacccattctgtataagctcatacattctcaacagcttaattctgcttcaaacagataatttactaagacagtggttttaattatgcaaaaaaaatcactgaatgtaatgaatcaaataagtattattattttgtttcaatcacttttaagataaggtttctggctttggaataccgcttaccaagtaaaagagttttaacaaagaaaaccaatagttttctaaaaagtgtatatttaatatacatttcctaaagcatttcctatatcttcaattattaataatactctacctgggtagagaaaatattgatttgaattattttatccatgtatgatgacatagaaattttttcatattcctctaatttctggggagcaagataaaaccactgatttgccccaaaaactcagtgaaagagtttttactagttcaaagatattttattctaaatgccttcagaattatattaatgtggcactaggaaagatcaactatactatacaacctacaataagtagacgcagatcttaaaagactaccagatttgcttttctacttggatttattggactatgcgatctctcaccatttacagacatcttaacaagaatattctaccaacaaaatatttgtttaataaaaatctcccttgataatattttccttatctacgtagtacttaactgaatgccaactatgtgattagaagcaatcatgttcaaaatgtctatttttgctttttttttttttgagatggagtctcgctctgtgccaggatggagtacagtggcatggtcttggctcactgaaacctctgcctcctggattcaagcaattctcctgcctcagcctcctgagtagctgggatcacaggcgcacaccacaacgcccagctatttttgtatttttactagagatggggtttcaccatgttggccaggatggtctcgatctcttgacctcgtgatccgcccgcctcggcctcccaaagtgctgacattataggcgtgagccaccacacccagccctttttgcttgtaaataaatttacaaccatttaattcattcaacaaatatattttgatcatctatgttagatactgtattcacagctaaaaaaagtatatattaagtacaaggcattttattagctgtggatgaagagagactgactaatttgaaaaaattccaaacaaaattttctttttttttcctacttagtccaatcaaaacttgagcattgatacattattttaagagcaccagctgggcacagtggctcatgcctgcaatcccagcactttgggaggccaaggcaggaggatcgcttgagcccaggagtttgagactagcctaggcaacatagtgagaccccgtctctacaaaaaatgtaaaaaattagccaggtatggttacaatttagtggtgaactcataaagggatacccctcgtaggcatctgcctgtggctcggtgacctcttagcatttcagaggcccggagatgagtccaagtggctgcctggcttctttaagccaggggctgtctctggtgcctcccttgccagcaaggcattaccgaccttcacataagcttgcttggagtacagaaacagtttctgaatctgaaagacttctccggtaagtgttgccaagggcaatcgacatcccttttgccttctcctgatctgttggcctccttaaaggtcgtgttccctcttcagaagtcctgctgacccttcccaatctgtaaaaagggccctgtttaaggggaatttccccaactggaaggagaataaagggcaacatttgggggaagtactcctgggcgatttcgtttcagttatgaaacctggttttagagttctgacttatcagggtctcatgtctgttcttatcttgtcctgtttgtgtgtggggaacccagaaggaaacattagcagaagttcaatgtgcctaacgggtggaaaggggggtctgttttatctgttttgctaggttaaaacttggatattgagccaagtaactggtgtttgtctttgttatgcgtatattgtaattttgtcttggtcgatacgggaaatactaacttaatccctcctacatcaagcagccccttggattgtatcttgcaaaactgggcagctttcacctatgaacccatgaaaacaaagaaaatggttttctttcataatcagcaagcagggtgatcaaagctctgctcttttggaagccacagtttaagagaatccaggaacctgacaagctggcaacagggtagtaagaatcatttaccagtcaggttcctgatctctctgtgtgaaatctggctgagcaaaaggtaaaaaatcactgtctcctgcaaggttttgattaataggagaaaaagatgtgtatgactagtcttgggaaatattgactgcagtgtactttttggtttatgaatattcatattgttccctttctttccagaaataatcttttctttgtctttctgtgttcttcataaaggggaggtactaactgagggttcctctcatcttgttttatgtccttgaaaacttgacctgtgactgagtgggagctctatgaaacagaacaattcctttatactatatactctggtttcaacagttacttcattttgttcttcttctacattggctaccttcttggagaccacaggttgcggaggcattttatattgccctgacataattttccgcttttgtgggtagcttcgaggctagtgacctgagctcacacagacccacatctgagctttctctagccttaaggtccaacccagcaatcccttttactttcattttagccattataggtaacaataaccaaggaattgaatattacgcttttttcatattagtttgcatttccttatgcatccagtgaaccagctccccagaagttgtatccatctccaaattcactgtaacttttacgtttagtaactgggcatagcctagctgcagttccatgccatggatgaccacatggtcacccaggaatcaaaggttccttatcctccatccttttattttatagattaatatcatcagctccctaaagaacctgtattgaaatggattataagagtaactaatctgggagcagtgtctttggtttcaaaatgctgcagagtgaaagaacatgtttgggttcgtacggtacccactgctcactattaaacaattgcaaatggttatacatgatccagaaaaacaggacattattagtgaggaaagacttagcctaatgaactggataaaagccactgtaaggtctctttaccctgagaaaagggactgtgcgactccacctataactgccaagtggagtaccccagatgaagcagctaatgtggtttgtatgcaagccatatgggactggcattatgatgacagggatattcaccccttgaatatgcccattacccaggtcatggtcagcttctcctcatggttcttacagatgctaacagaaaatattaggttagttaacaagggaatggtgaagggtagaggggaggatcaaaggacttatcccaggacgatgggaagttttaacagttatcaagaaatataatgaatgaagaaaacattgataggagtaaaaataaggggaaaagaaaaggggagagtcatgggtctcatcccagcagagtgaaaatctttagacagttattaagaaattgaatgaataaaatggaaattgatggggttgaaataaaggccttaattgctggttcccccaatattaaagggtaccaaatcagttttctgtacttaccccaattggagacatcttttaaaaaatcagaagacaaagatcagaatgagaaaactgaccaaaaactgcctggggatgatgttgaggtgattaatcaacacaaagattgactaaaaagccttggtcccttagctaaaccctctgctgggaacccaaatcccttttcacaggagagggtaaaatggtctgggagtgaagagaaattcccaggaccagaacataaaatgtaagggtggataggattatcaaagttgaaatgtttatataggatttttgtaaagtaattgtgtattctttacctaaatgtcttatgaaaatggatattgtatctgactaggggatgtttcctctacctagtactataaaactgaaggcacacaaatctgcccttcaagctataattaactggacatactaaaatgggaaccagtaagactgcctgagcccacagaatacagaatagaagctggagtgctggtaggaacaaattctccatgtgatagccttttgtggaatgcaaaagtctgtgagcacatcccagtgatgactactgtgactctgaactagagaattttcacttaagaggcatttactgccttgttataggacattaactgaagacattctatgatggaaggacataaaatgatcatgacatctgaaatacccatgctctttggggcaatgtcagaaacagtctaattggggtcagcagtgcccagaagagttccacaataaaatggagatactttgtatatgatcatgctacttgggaaattcaaggaggagacactcatgagcagggagcctctttttccccaggactgactctgaaactgtgtgagaagctgcaggattctacagtgcccattaaacagctcttacctgactgacaaagagctgcctggtttatgaatggcaattccaaggtgaacagacaacaatctgtttggaagtctgctactctgactgaagaggagtcaagaaaacttttttttcttttgagctatttatagcttatgacaagtaaagtatatctttatgagcaaaatttgcctttctacctgagttctcacaattgtggaaacttccttcataagtattcttattttatggcaatatagttatttgcatacattcaataagaatctgctttctttggtagcaggacacaattggagatgctagctactttaccaaggctttgactggattggcatatttttagatatgaccagactgctttgaggagttgacattgactttacagagccaataaaagcacctcggaaagactagccttccatcttgtctatgtagtttctttatagtgttcctcacctgcgataagtaaaaaatgttactttcaacagatccagaaacctcaagttattctgggacctccacaagagatgagtggaggtcccaaaataacccaattcatataggtatctgtaggcatggataaatccttggtttagctaaccttaaggcttttaaaaagtctaaactaagattccttatggaaaagtttctgcaaagtcaacttaaaagagcctatatggccaacgaatattcttgccatactttatgcaaatagtcaggcaaagtataacacttattttgcaaataaattggtcctactataatttgtctttggtagaaatggaatactagagataaaaattttgtttcaaaagaaactatagtatacctgttactagattctagtcttagtcttgtctattacttttgagtttttattgttttctacaatttgaactaaacctgaattcttccctggctacaagtcttcaaactaagattttcaaaaatttcttccatttttctgacttgaactctgttccagacagaaatatagttataactaagcattaataggctatactttggcccatttccttgttgctaaagtcacatagcactacatgctgaccatttacatccccactgttcttacagacaggatctctgacattagaatcataaggattttgcttaaggatcattgaaaatgtttttcagaccctgagttgcagtgaaacagctgatgccaaccagtcagaagaccctcatagaggaatgaaatcagcatgagaatacagcttcttcatcatcctgtcccattacttcaccttacactctgaccaatcaacaatctccacacttcagcccagtccaaaacccttaaaaactctaggcccaaacttctcagggagatggatttgaggttttctctcatctcctagtttggtgacccccagattaaacctttttctctgctgcaaaaaaaaaaaaaaaaaaaggaaacagagaaaataaagattcatgaaagttatatctttaggatagtctaaggcatatgatatatattttaacacttacataatccatccaaatgataaacaaatataaaaaagaagtttataaaacatcagtctagttggggcagtgaaaataggttttctgccccaaagtctctcctttgattattctagaatcaatatgacagacatttccttttttattcttacttcagtgtatgtgtacacacacaaaacatgaaaaagaattagaccattttatgtggaagcatctaatataaagcctaccatgaaagcaattaatgtttattctttgttgtttactcattcataacactggtgaaaaaaacctacccaacatcaaatatcaatagtttgataaacttttttttatagttgcttgatgaactataatcaaacaactttggatttgcattaggaagccaggaattctactacttaccttttcctgacaatgaatcacggcggttctgtagatagtacaacagctgttctacctcatttagttttgaaggatgaatgagtttacattcttcaaccaccttccttgccagggaagttatatctgtgttggcattgagactcttaagtcgaatgctgtaagtataacagaatttttcaactcacgtattataaaagtaataacttcaatactactactttaaaataatttatagattataaattattatagagaacctggccatagactcttagtaaaataaactattagatataattaggcttagaaaaatacaaggcagtgattttctgtgaactagacaaacaaaataacaaaaggaacataaaatctttttcagactctctaggcaagacagcatattcagagattctgttttaaaacagtatttctgatataaaatatataaagtctttagcattattaaatgtaagaatccataccatcataaataaatcattttcttgaccatacccacaaatgctaactttttttcagctagggacaagacacaatattgatatgttcagattcagttgttctggtggtaactatatagaaggtaaaagcaaaaaaaaagtgagatctggccgggcacggtggttcacgcctgtaattccagcactttgggaggccgaggcaagggggatcacgaggtcaggagtttgagaccagcctggccaatatggtgaaaccctgtctctactaaagatacaaaaaatttgccaggtgtggtggtgcgcgcctgtaatcccagctactcgggaggttgaggcagcagaattgtttgaacttgggaggcagaggttgcagtgagctgagatcgcaccattgtactccagcctgtgtgacagggcgaggctctgtctcaaaaaaaaaaaaaaaaaaaaaaaagtgagatccactttaagatctatatgaggaattttgaggaacaaatgaatacattttatacttaagttagtgcactaaaaaacaataattagccaacacctccctccttttaaagttagcccaggagattcactgggaacccattaagaaaccattattaagagtttggaaacaattacctagttacacggattcagggtaccaggaagagatataaagacataaaattaggttcaaagtgaagagtcaacctagtgtcaaaagactgtcaagcaaatgctcccatgcaaggttcttttgaaaaagagaaagatgaacaagcagccactgtgtagaattattttgtgttaaagatggctaatttttgttggaagacatcaaggaattagaagggcaggagtggggatctcagagcaatgtcctgtaagcttattatccatatgtagatgatttctcccgaaaccattccagcagaatgacttagatattattcccagctatatattcaaccccaaatctggttctcctggggttctacaagctatgtaatagcttttaataaattccttttctgtttaaatttgctagagtgccttctaatgtttacaagaagaactctagcagtattctgtccctttatttcttccttatttgggtttttttttttttggttcctaccttttaagtcctttaattttattatatttttatatagttttagctgcacatcagaaggcatagagagaaaggtcaatacagagaaaaactctaaaaagacctctagtttgcttccaattatttgcaattatgagtaaaactgctataaacattcaagtgcagctttttgtgtgaacatgttttcaactcatttgggtagatatctagaggcataaggaggggccaagatggctgaacagaaacagcctcagtctgcagctcccagtgagaccaacgcaaaaggtgggtgatttctgcacttccaactgaggtacccagttcatctcactgggactggttaggcagtgggtacaacccatggagagcaagcagaagcggggtggcgggggcgtcgctacacccaggaagtgcaaggagctgggggacctccctcactcagccaagggaagctgtgagggactgtgctacctggcccgggtactatgcttttcccacagtttttgcagtccgcagatcaggagaatccttggtgagcctataacacctgggccctggatttcaagcacaaaactgggtggctgtttgggcaggcaccgagctagctgcagaagtgtttttcttaccccaggtgcctggaatcccagtgagacagaactgttcactgccctggaaagggggcggaagccaaggagccaagtggtctcactcagtgagtcccactcttatggagcccagcaagctatgaaccactggcttgaaattctcactgccagcacagcagtctggagttgatctgggatgatcgagcttggttgggggaggtgggtctgccatcagtgaggctgtagtaggtagttttccccggacagtgctaaggagactgggaggtttggactgggtagaattcaccacagtgtggcaaagtggctgaggccagactgcttctctatatgcctcctcactgggcagggcatctaagaaggaaatgcagcagccttaggggcttacagataaaactctcatctccctgggatagagaacctggcaggaggggtggctgtgggcacagcttcagcagacttaatctttcctgcctgctggctttgatgagagcagctgatcctgacaagggaaattctcccagcacagcacaccagctctgctaagggatagactgcctcctcaagtgggtccctgacccccatgcctcctgactgggagagacctcccaacaggggttgatagacacctcataaaggagatctctggctggcatcaggccagtgctccctctgggacgaagcttccaggggaaggagcaggcagtaatctttgctgttcagcagcttccactggtaatacccaggaggacggggtctggagtggaattgcagcacactgcagcagacctgcagaagaggtgcctggctgttgatacaaaaactaacacacagagagcaacaacaacaacatcaacaaaaaacaccacccccccccaaaaaaaacccatacaagggtcatcagcctcaaagatcaaaggataaatccatgaaaatgagaaaaaaaccagcgcaaaaatgctgaaaatcccaaaacccagaatacctcttctcctccaaatgatcgcaagtcctctccagcaagggcacaaaactggatggagaatgagattgacgaaatgccagaagtaggcatcagaaggtgggtaataacaaactcctctgagttaaaggagcatgttctaacccaatgcaaggaagctaagaaccttgataaaaggttacaggaactgataactagaataaccagtttagagagaaacataaatgacttgatggagctgaaaaacacagcatgaaaacttcgtgaagcacatacacaagtatcaatagccaaatcgatcaagcagaataaagattagagattgaagatcaccttgctgaaataaggcgtgaagacaagattagagaaaaaagaatgaaaaggaacaaacaaagcctccaagaaatatgggactatgtgaaaagatcaaacctatgattgactggtgtacctgaaagtgacagggagaatggaaccaagttggaaaacacacttcaggatattatccaggagagcctccccagcctagcaagacaggccaacattcaaattcaggaaatacagagaacaccactaagatactcctcgagaagataaatcccaagacacataatcatcagattctccaaggttgaaacaaaggaaaaaatgttaagagcagccagagagaaaggtcaggtcaactacaaagggaagcccgtcagactaacagcggatctctctgcagaaattctacaagccagaagagagtggggaccaatattcaacaattttaaggaaaataattttcaacacagaatttaatatccagccaaactaagcttcataagcaaaggagagataaaaacctttccagacaagcaaatgctgagggattctgtcacaaccaagcctgccttaaaagagctcctgaaggaagcattaaatatggaaaggaaaacccagtaccagccactgcaaaaacacaccaaaatataacgaccaatgacactgaagaaactacatcaactaatgtgcaaaataaccagctaccagcatgatgacaggatcaaattcacatataacaatattaaccttaaatgtgaatgggctaaatgcctcaattgaaagacacagactggcaaattggataaagagtcaagacccattggtgtgctgtattcaggagacctatctcacatgcaaagacacaggctcaaaataaaggaatggaggaatatttaccaagcaaatggaaaaaaaaaaaaaagcagggattgcaattctagtctctgataaaacagactttaaaccaacaaagatcaaaaaagacaaagaagggcattacataatggtaaagggttcaatgcaacaaaaagacctaactctcctaaatatatatgcacccaatacaggaccacccagattcacaaaacaagttcttagagacctacactacaaagagacttagattcccacacaataatagtgggagactttaataccccactgtcaatattaggcagatcaatgagacagaaaattaacaaggatattcaggacttgaactcagctctggatcaagtgtacctaatagacatccacagaactctctactccaaataaacagaatatacatttttctaagtgccacatggcacttattctaaaatcgaccacataattgggagtaaaacaatcctcagcaaatgcagaagaatggaaatcataacaaacagtctctcagaccacagtgcaatcaaattagaactcaggactaagaaactcactcaaaaccacataactacatggaaactgaacaacctggtcctgaatgactgctgggtaaataaaaaaattaaggcagaagtaaagaagttctttgaaaccaatgagaacaaagagacaacataccagaatctctgggacacagcttaagcagtgtgtagagggaaatttatagcactaaatgcccacatcagaaaggtggaaagatctgaaactgacaccctaacatcaaaattaaaagaactagagaagcaagagcaaacaaagtcaagagccagcagaagacaagaaataactaagatcagagcagaaatgaaggagataaagacacaaaaaactcttccaaaaatcaatgaatctaggagctgttttttcaaaaaaattaacaaaatagactgctagctagattaataaagaagacagaaaaatcaaattgacacaataaaatataataaaggggataccaccactgatcccacagaaatacaaactaccatcagagaatactacaaacacctcgaagcaaataaaccagaaaatctataagaaatgaataaattccaggacacatacaccctcccaagactaaaccaggaagaagtaaaatggctgaatagaccaataacaagttctgaaatttaggcagtaattaatagcttaccaaccaaaaaaagaaaaaggccaggaacagatggattcactgcagaattctaccagaggtacaaagaggagtgggtaccattatttctgaaactattccaagcaagagaaaaagagggactccttcctaactcattttattaggccagcatcatcctgataccaaacctggcagagacacaacaaaaaaaagaaaatttcaggccaatttccctgatgaacatcaatgtgaaaatcatcaataaaatactggcaagctgaatccagcagcatatcaaaaaacttatccaccacaaccaagtcggcttcatccctgggacgcaaggctggttcaacatatgcaaatcaattaatgtaatccatcacataaacagaaccaaggacaaaaactacatgattatctcaatagatgcagaaaaggccttcgaaaaaattcaacatctttttatgttaaaaactctcaataaactaggtactgatggaacatatctcaaaataataagagctatttatgacaaacccatagccaataccatattgaatgggcaaaagctggaaggattccctttgaaaaccatcacaagacaaggatgccctctctcaccactcctattcaacatagtattggaagttctggccaaggcaatcaggcaagagaaagaagtaaagggtattcaaatagaaagtgaagaagtcaaattgtctctgtttgcagatgacatgattgtatatttagaaaaccccatcgtgtcagcctaaaaactccttaagctgataagcaacttcagcaaaattctcagtatacaaaatccatgtacaaaaatcacaagcattcctatacaccaacaacagataagcagagagccaaatcatgagcgaacttccattcacaattgctacaaagaaaatgaaacacctaggaatacaacttacaaggtatgtgaaggacctcttcgaggagaactacaaactgcttctcaagaaaataagagaggacacaaacaaatggaaaaacatcccatcctcatggataggaagaaaaaaatggccatactgctcaaggtttataaattcgatgctattcccatcaagctagcattgatttttttcacagaactaggaaaaatactttaaatttcatatggaacaaaaaaagagcccatatagccaagacagttctaagcaaaaaacaaaacaaaacaaaaaaaaacccaaagcatcatgctacctgacttcaaactatactacaaggctacagtaaccaaaatagcatggtactggtatcaaaacagggataaagaccaatggaacagaacagagactcagaaataacaccacacatctacaaccaactaaccttcgacaaatctgacaaaaacaagaaatggggaaaggatttcctatttaataaatggtgctgggaaaactggttagccatttgtagaaaacagaaactggaccccttccttacaccttatccaaatgttaacccaagatggattaaagacttaaatgtaaaacccaaagccataaaaaccctagaagaaaacctaggcaataccattcaggacataggcatggacaaggacttcatgactaaaacaccaaaagcaatggaaacaaaagctaaaattgacaaatgggatctaattaaactaaagagcctctgcacagcaaaagaaactaacatcagagtgaacaggaaacctacagaatgggagaaaattttttgcaatctacccatctgactaaggtctaatatccagaatccacaaggaacttaaacaaatttacaagagaaaaaacaaacaaccccttcaaatagtgggcaaaggatatgaacagacacttctcaaaagaagacatttatgcggccaagaaacacatgaaaagaagctcatcatcggtcattagaaaaatgcaaatcaaaatcacaatgagataccatctcacgccagttagaatggtgattattaaaaagttttggcagatgctgctcaggctgtggaaaaattggaattggtttaactattgtggaagacggtgtggcgattcctcaaggatctagaaccagaaataccatttgatccagcaatcccattactgggcatatacccaaaatattataaatcattctactataaagacacattaacacataggtttattacagcactatttacaatagcaaagacttggaaccaacccaaatgcccatcagtgatagattggataaagaaaatgtggcacatatacatcacggaataatatgtagccataaaaaagaatgagttcatgtcctttgcagtgatatgaatgaagctagaagccatcattctcaacaaactaacacaggaacagaaaaccaaacaccacatgttctcactcataaatggggactgaacaatgagaacacacggacacaggggagggaacatcacacatcagggcctgtcagggggtgggggacaaggggagggagagcattaggacaaatatctaatgcatgtagggcttaaaacctaaatgaggggttgataggtgcagcaaaccaccatggcacatgtatatctatgtaacaaacctgcactttctgcacatgtatcacagaacttaaagtaaaattaaacaaacagacaaacccagaaacacatcttttatggttgatttcacaagttagtagttcataatctattatattcattttctaaatgggataaattagaatatgtatgttacaacaggttcctattaagcttacaaaaatctcattttttcctaggattaatatactccatacttacagtttaatataatctctccttcactaagatgaagtatgcctggaagaatgccataattaatcacctatgctgatcaaaataatatcagatttgtataaagtttatataatgttcactactttcaaaatgtgcacaaataaagaacttacattttttgacattcttttcgttctcccaacatggggtcccccatttctccaagaatggtagcttccacttcatagtgaacaatgagtgctttttctgatggatgtacatctatattccctcctttaactttcctataatacaaaattgaaatgatataaccagattaaaattctcaaagtggccatggtttttatctatttttaggtctataacgtgggttggattaacatgtgcatttgaatcagattactcttgacttgggattagagataactctttttctctgttttatatacatatatatgtatatatgtgtgtatatatacacatataaatgtatacatataactttgtcatgcataaagtatctttataaatagttctacctaagaaaaaaaatacatttaccaaagaatcatgcataagagcaagtgaatgaaacataaacaagtaagacagctttggagagaatgacctcaactaaaagtcagttattcaaaaccaaaggcaactgccttaaaatttatattaaaagaaaaagtcaggccagacatgatggctcacacctgtaatcccagtgacttgggagaccaacatgggagaaacactttaggtcagaagtttgagaccagcccaggtaacatagcgagactctgtttctacaaaaaatttaaaaactagccgggcatggtggcaggtgtctgtagtcctagctaattgcaggctgaggcgggaggatcacttgagccctctgatggtgccactgcactacagcctgggcaatagaacgaaactctgtctccattaaaaaaaaaaaatcaacctgcccgttaattaccccattaactggaccaaaagacacgaagaaattgtctatattacaatatatgtcatgtatcatctaacataatggtacaagttgtagaattagtacctaaataaaatcactgaatcacacccaaattacataacaaaaaagcatttacaggttaggtacgctgtatagtcacatatctcaaattatagtgtcaatagtaggttctatggaaaggttgtatatactctttcttcaagccaataaagtcgcaaaatgaattcttaattgcagtaaaccaatgatgaattaatcactatttgccacttggccattttagaaggcgataaagttggttgtgctggaagagattaagcaacagaaacaagcaaaatctctcattcttagtcctagctagcagttagctgaccagtggggtcttttagcctgataagaaaaacaaaaatatgacaacaccttaaatttaattccaataattagaaactcaaagcttttctttcagttggaaataatactttgactaattatgcatatttttaaagtaattttttacggatctgtccaccagaattccatatgaaaaggagatgcatctggagtgagtattagggttatgattaacagtcaagtatagtgatagggtaggaaattaagtacactaaagcatagattctaggtaggtcagaaactaaactgatagtaagacatataggacaagtaaagaatgaaaacagaagccagggaggccagcaaaaatcgaggaattaggaaatgagatataaatatatatttaaaagaatggtacagattccaaaaggtaagataaacagataatatgtacaaaagctatagaagtcacaggaaacaaaagatctaaggaaagctgaaaacagatataatgtagcatcactataagaaacataagaaactatcttaattacataaggcaaactagttacttccttcctgataacatgaaaagcaattccagtactggactttttataactgtatacagttaagggaagaaaagagtaaggatatataaatgcagatccttagactagcctcctattaccactttaaaatgggtctttcacatattggcagctgggggaattgcataattcttgtcctctgttgtctcatatcttgcctttccttaaaggaatcaaataattaaaaaggaaaaaaatgaaatgcctcaccactcctttttagtttttgtttgccttttttttgctgtgtatgtgtgttttagaggagtaagttaattacaatttatcacaaaatcaacttatgtttattatagaaaaactaaaacagaaatgagcaaagaaaaaataaattcaaaaacttacaagaagtagtcacttgttattttaccacatatacattcagatatttttctatctatactaaataatatacaaagagagaatgacagctatagttttttttttttaacagaagaggcttaagggtagtattctagcaggggtgaaactatcattttatcttaaatgctgaactttcaagctgagtagcattcacaatgatgtcagatatttaactactgggaggattaatttccaaacgttctacttgaattccattaattagatgaaaaaaatttgagccattattagaaattaatgaatttctatttgaagcatactatgacactgatattaaattgatatcttttagctggttgcaaatttcttctactaatagagccttctcaataacagctctgcttcactttgttttcatacatgtgtaagaaaactagaaccaaaagtgtgctaaattgacttagaaaaatcattttcttttaatctcaatgagaagttatgcttcacagagtaatatgaaacataccttctataactgcatgtgataaactgtcaccttttgggacagtgttcttaattattaacttctgaagtacatccttatgttcctagatttcatgtggttagagatattattgtgacccttaagaaagataataaatgctgatgaaccttgtgttgccacccattcattatcaattttcttgagaaaccaaaaatgcagtccttaacttttcattaaataagaacttttaaaaaattattcttttcaaaaggatttactgcaaaataaaattgtatcaaataataaaataaaaaacagttgtagatttacgccatagagcaaataacagagccgttttaggaagtgtttggtctactctccatatgctctctggcaggactgctatgcatctatttcctccatctacttgaaaaatacccaatatatcagtgtccacaattccaaatgaccttaccaactgtcagagcatatgaattcatttccacagtttacagcatgggtatggcacaataggctgcttaatggggaactctattcactgctcatatgtctcatacactactagacaagacactagcagaagcttgaagtacaaaatggaaatctaccaaatcctccatcccagcttgttttaatgtaattactaatgatacctccataacatttttttttaaactgggacaaatgctaaatcagatgggctgaggcgggtgtaggggaggaacagctgaaaaccagaactgtctagggcaaagaagcaaaaaatgatgaccctaaccaaatctaatctttccttgcctactcaaaggtgctcttcagtaattatttagtagtccattcccatctgcaaataaacatatgaaaacgtctcaggttaactgctcctgaatgactactgggtacataacaaaatgaaggcagaaataaagatgttctttaaaaccaatgagaacaaagacacaaagaaccagaatctctgggacacatttaaagcagcatgtagagggaaatttatagcactaaatgcccacaagagtaagcaggaaagatctaaaattggcatcctaacatcacaattaaaagaactagagaagcaaaagcaaacacatttaaaagctagcagaaggcaagaaataactaagatcagagcaaaactgaaggagatagagacacaaaaaaaatcaatgaacccaggagatggttttttgaaaagatcaacaaaactgatagactgctagcaacactaataaaggagaaaagagagaagaatcaaacagatgcaataaaaaatgataaaggggatatcaccactgatcccacagaaatacaaactatcatcagagaatactataaacacctctatgcaaataaactagaaaatctagaagaaatggataaattcctggacacacatacaccctcccaagactaaaccaggaagaaggtgaatccctgaacagaccaataaccaataggctctgaaattgaggcaataattaatagcctaccaaccaaaaaaagtccaggaccagatggattcacagccgaattctaccagaggtacaaggaggaactggtaccattccttctgaaactattccaatcaacagaaaaagagggaatcctccctaactcattttatgaggcctgcatcatcctgataccaaagcctggcagagacacaacaaaaaaaaagaattttaaaccaatatccctgatgaacatcgatgcaaaaatcctcaataaaatactggcaaactgaatccagcagcacatcaaaaagcttatccaccatgatcaagtgggcttcaccattggaatgcaacgctggttcaatatatgcaaatcaataaacgtaatccatcatataaacataaccaatgacaaaaaccacatgattatctcaacagatgcagaaaaggcctttgacaaaattcaacagcccttcatgctaaaaactctcaataaattaggtattgatgggacgtatatcaaaatagtcagagctatttatgacaaacccacagccaatatcataatgaatgggcaaaaactggaagcattccctttgaaaactggcacaagacagggatgccctctctcaccactcctattcaacatagtgttggaagttctggccagggcaatcaggaaggagaaaaaaagggtattcaattaggaaaagaggaagtcaaattgtccctgtttgcagatgacatgattgtgtatttagaaaaccccatcgtctcagccaaaaaatctcaagctgataagcaacttcagcaaagtctcaggacacaaaatcaatgtgcaaaaatcacaggcgttcctatacaccaataacagacaaacagagagccaaatcatgagtgaaattccattcactattgcttcaaagagaataaaatacctaggaatccaacttacaagggatgtgaaggacctcttcaaggagaactacaaaccactgctcaacgaaataaaagaggacacaaacaaatggaagaacattccatgctcatggataggaagaatcaatatcgtgaaaatggccataccgcctaggtaatttatagattcaatgacatccccatcaagctatcaatgactttcttcacagaattggaaaaaattactttaaagttcacatggaaccaaaaaacagcccgcatcaccaagtcaatcctaagccaaaagaacaaagctggaggcatcacactacctgattttaaactatactacaaggctacagtaaccaaaacagcatgttactggtaccaaaactgagatatagaccaatggaacagaacagagccctcagaaataataccacacatctacaacaatctcatctttgacaaatctgacaaaaacaagcaatggggaaaggattccctatttaataaatggtgctgggaaaactggctagccatatgtagaaagctgaaaactggatcccttccttacaccttatacaaaaattaattcaaggtggattaaagacttaaatgttagacctaaaaccataaaaaccctagaagaaaacctaggcaataccattcaggactcaggcatgggcaaggacttcatgtttaaaacaccaaaagcaatggcaacaaaagccaaaattgacaaatgggatctaattaaactaaagagcttctgcacagcaaaagaaactaccatcagagtgaacaggcaacctacagaatgggagaaaatttttgcaatctacccatctgacaaagggctaatatccagaatctacaatgaacttaaacaaatttacaagaaaaaatcaaacaaccccatcaaaaagtgggtgaaggatatgaacaggcacttctcaaaagaagacatttatgcagccaaaagacacatgaaaaaatgctcatcatcactggccattagagaaatgcaaatcaaaaccacaatgagataccatctcacactagttagaatggtgatcattaaaaagtcaggaaacaacaggtgctggagaggatgtggagaaataggaacagttttacactgttggtgggactgtaaactagttcaaccattgtggaagacagtgtggcgattcctcaaggatctagaactagaaataccatttgacccagccatcccattactgggtatatacacaaaggattataaatcatgctgctataaagacacacacacacatatatttattgtggcactattcacaatagcaaagacttggaaccaacccaaatgtctatcaatgatagactggattaagaaaatgtggcacatatacaccatggaatactatgcagccataaaaaaggatgaggtcatgtcctttgtagggacatggatgaagctggaaaccatcattctgagcaaactgtcgcaaggacagaaagccaaataccgcatgttctcactcataggtgggaattgaacaatgagaacacttggacacagaatggggaacatcacacactggggcctgtcacgtggtggggagaggggggagggatagcattaggagatatgcctaatgtaaatgacgagttaatgggtgcagcacaccaacatggcatatgtatacctatgtaacaaacctgcacgttgtgcacatgtaccctagaacttaaagtataatttaaaaaaagagtaaaataaataaataaaataaaaccacaatgagataccatcaaaaaaaaaaaaaagaaaaagaaaatgtgtcaggttaaagggcaaaaaaaaaaacccaccacccccaaaccctacattgcttaatgccactgttgcttaacaccttgatattcatcctattaacactgcttttcattgttacaaaactctttttgtgtttggttttttcattttttaaaaaaaacagacccaaagcttacaaaacttcttttgttttgatattcactctaattagtctactcacatgtgaacccattccagttagactttggctctaaactctactcctaccttaccaaaaaagctctggtcaaggtcatcaatttcttccatgttctaaatatttaaagtttttacatttttgtctttgatttatctgtatattatttttgtatttttgtggggataaattttaacttttttccatagaaacaaccaattgtatgagcaggttttgctgtgtcttttacactttttttttggtagaagtcatagtcaagcacattttgcatctggaaccagtatgtacctactacacacataaatgaaacaaaaaattcatgaaatcatgcctattcttatcatgtgaaaagcactctatcctattcacaacccactgatacattgtgaccctactgcttagaaataaacatttatttatagtcttttttttttaatcactggttggcaatgttacctctttgcaaaaatgggaatgaaaccacctttgcaaaaattataacagtgagagaaatctaaccttactccatcttgcttccaacctcacatgctacctgcctctatcgactctaaaacaaaaatgataacaatcccttcccaaaactagccttgaaaccacctttgtaagactaatgaaaggccccaatattagaattacgggagggacctaaattctgctaagccagtagatgcagttaaacgataaccagccattgttccctagtttgcctttctataataatctactgctccagaggtcacaagatttgtatcttccctaattgctctgatagataacaacactattgtcaaaacctaagattagtctttgagatatttttcagacttttgtattctggacactgactgactccacctggacctgtgactcacaccactgaactaattcaactggttctgtgatccccacccaggaactgactcagcacaagaagatagctaaacctgctataatatcatccccaagtcaatcaatcagtgtctcccatttcctagccctctgccctccaaactgtccttgaaaaaccctaacttccaacttttgggggaggcttgtatgagtaacactcccaccctgctgcttggctagccctgcaattattaaactcttactctactgcaataccgctgtcacagtgagttgtttttttctctgtagtgggcaagaataacccatagacacacccatgtgtgtctatttctaggcttttcattttattcagttggtttactgagctatttttacatcgatacctgagggaagtgttcccaacctggctcttccatatttttctcagtattgcgggacctttccctgtccacttaaaaatttaaaattgtgtttcaaattcagtaaaataccttttgggataatgactgacataatgaattttcagattaaggcatctatccatgaaaatgataaatctacttttaagatttaattttcttttaatgaaatgatataaatttctttagaaaggtgatgcccatcatttattattagatttattcccaagtaccttatattgttatttgcatttgtaaataacttttttgctaacaatatttaaccaactatatcaaaattcaatttgggagtgggaggtatatagatgttacatccagcaactgttgcttaataccttgatattaatgccaatagcttgaacattattttaggttttctctacaaactaatatataatttgtgaataatatcagtttcatttcttctcttcctatctttataccttttctatttcttatcttactacctgtttaggactcctggtgaaatgttgaggtggttacataggtatccttggatcatccttaatgttaagggaaatgtttctaaagtttcctcatttactgatgttactttattttttgagaaagggtctcactcttgtcacctaggctgaagtgcagtggtgtgatcacagctcactgcagccttgcctcccaggctcaggcaatcctcccacctccaccttccaagtagctgggactacaggcatgcaccaccatgcccagctaagttttgtattttttatagagatggggtttcaacatattgcccaggctagtcttgaactcctgggctcaagcgatccaccagcctcagcctcccaaagtgctgggatgacaggcatgagccaacacacctggctagtttcctcatttaatatgtttatatcataattcccttttatttatggctttagttttttccttaaatcatgaatgtgtagtgaatgtcatcaaatgtttttctgcatccattggaggatcatgtattgttcttctttaattcataaatatactacatcaaattcattaaatacataaaaccatactcatattcttagaataagcacaacttgttaatgctgtcttaaagcactgttagattaaatttgcatccttgctcattcagcctgcaattttcctttctaatgtcctttttctgactttcatatggagattattctaaaatcttaatataaattagttgaggagtatccttttttttctagacttcttggaagagttgtacataattggaagcatctgtttcccaaaaattttgttagaatttgactttaaaactgtctggatgtagcagattttatcagtatgaaatactcctctgtagtttttacagtatacgttttcttaaagcctattttatctgacattaatatggtcattttagcattcttatgcttactgtttgattgcacccatttaccattaacttaccatgtccatacttaaaagtatattttttggggatgacagatagttgggtcttgcttttcttttttctttataaaagaaatattggtggccgggcgcagtggctcacgcctgtaatcccagcattttgggaagccgaggtgggtggatcatgaggtcaggagatcgagaccatcctggctaacatggtgaaaccctgtctctactaaaaaatacaaaaaattagctgggcatggtggcgggcacctgtagtcccagctacttgggaggctgaggcaggagaatggcgtgaacccgggaggcggagcttgcagtgagccaagatcatgccactgccctccagcctgggcgacagagcaagactccacctcaaaaaaaaaaaaaaaaaaaaaaaaaagaaatattggtaatctctgcctttccattggaacattaaaacctatgctgtctgatacaatagtcactagctacatgggtctatttaaaattaaatttaaatacattacattttaaaaataattaaaaatgcaattccttagctgtactaaccacgttcaaagtgttcattagccatacagccagtggctatgtatttgatgatgcagctgtaagtcatttccatcagggaagaaagttctattggacattattgttttggatcatttaatgcaatgactgacatacttagattcagatctatcacttcatttttatttcctgtttggcccaactatactttgattattttcctaacagccttgtgaattattattttttaaattccattttgtgtagatgttttcactatacttttaaaaactgtttttggtggttgctttaggaaaaacaatgttttagttaccttttttttttcacaaggtatttaagaattaatgctgtgctacttcacaaattgcaggtctattgcctacacccccccccccattctttatgttatagctgtcatatgcattatgtgtacataccttataaactcacacaaaaatttcataatttttgctttcaagtcatatgtatttttaaaaaattaagagggaaataatctcttatatgtactcaaatatttataattcctgatgcttttcatattggtaaaaccaaaacaagttttatatttctattactaacattagacttggtaatagagaaacagaggattaaggtaattcaaaccaatgcaccttctaagaaaatcttaaaagctgggggcaaaaacacgtatgtgtgtatctgtttgaggccataagagaactaaaaaggcacaaaaaattacagtgccaagatccaggagaaaaagaaaatgaagagaggtaaatcttgaatttgaggctacttttccctagaggtatctgctaactgaaaagagagggctgagaggttgagaatcttttaataatcacatgaggctagagacacaaaaactggattctagagtgcaccaaacaacagtggctctggtaaagctccaagctttaagcttgaaacaggaggactacctcctaggagtaactgtgaaacagatgcagatcggtcaccaacaagactaaaaagcccagtttaatgtaattgaatctctgagaactaattaaggtgaccctaaattttcagtaatccttactaacataaataaaatataatcttctctggaaaaagagaacatcatcctgagcctcaaatgattatttatacatttatattcctatatatgatactcaaagaatagtcatcttcagaaaaaactagataatttttttaaatttctagaattaaaaatacaataaccaaaattaagaataataataaataaataggtttaatagcagattagatacgggtaaggagataatttatggcataaaatataagtcagaagaaaacacccagaataaaacatagagacaaaaagatgtaaaacacaagcaaaagtataattcagcaatgcatactgagtaggtctagcatatgtacttgaagtcccagaaaaaaggtgagagagaatgggtacagagcaatatatgaaaagataatggctaagtgacatcagtgaaaacggcagagtagggacctctagaggctggcactccccagaagcactaaaaacttggcaaaaaaaacctatcacaatcaacctcatcagaactctggaagacagtcaaaggtttacagcaaccaagtgaatgtttaatcagaagaaaggttacagaaacaaggtaggcgatcattatggtcttttcacttaccctagacatccaccccactctcaagcacagtggcagtcttcaagatggcagcccacgttcccactgttaatacttggttctagaggagtcaagtggaccttgctcccaaggaattttgtctgattgttttgcaactgactgaagtttcctttgaggtcagctgcaaggggctttcctttgttttgactaattttaaactcttatcaggatagtgcagctatgcagtcactgaaatcagtgaaagccaagcatacaagctgctggcccctgggataaatagtaatagctgggtcaaacaaaacacaagctgaaagcccaagaggaaagtccagggagtcagacattttgggggaatagatgctttgaaaagctattgcatataaagagaaatctagaaatccatgagcatgctcagggcagaatacatacccagaaaaaacctgggaagatcataagcttttacctctggctggtcttcaggctctgtgcaagcagcaaatgaaggctaaggtaaaattgtaaattgcctggctaagtgttgaagccatatccaaacactgagtcaacctacaaagatctgaagagtatttttttcttttctttttttcctttggataccataatattcaaaatacccagttttcaacaaaacaaaatatgaaacatgcaaagaaacaagaaactcattctcattctcacaataaaaaaaattaacagaaactgtccatgctacagcacaaacactggacttatcaaagactttaaatcaactgtcttaaatatgtccaaagagcaaaaagaaaccagtgcaaataactaagaaaaaggagaaacacaatgtctcaacacataaatagtttaaaaatatattatcataaggatccaaacaaaaacactagatctgaaaagtacaataactgaaataaaaaaatcactacagggtttttaacagcagatctgagcagagagagaaaagaatcagcaaacttgaagatatgtcaaatgaaactgtccattttgaggcacagaaagaaaacagaatgaagaaaaataaacagaacctaagagacttatggaacaccatctagtataccaacatatgcataatgagggtatgaaaggagaggaagaaagaaacatagagaatactgggagaaaaaacagtcaaaaacttcccaaattagaccaaagacaaacttacacatccaagaagctcaatgaaattcaaagataaactcaaacagatccacaataagacactctatactgacgctctatttaaaaaaataaataaaagattttgaattaataacctaattttacaccttaaggggctagaaaaagaagagcaaacaaaaccccaagctagcagaaggaaataataaaaagcagcaacagagactagaaaaagaatagagaaaatgaaaccaaaggttagttctttgaaaagatcaacaaacatttttggaaaacttttagttagactgactaaaaaagaaaagaagagactcaaattactaaaatcagaaatgaaagtgggacattactgctgctcttttgatgattaaaaaattacaagagaataatatgaacaccaacaaattggataacctacatgaaaaagaataattcctagaaacacacaaactaccaaaactgactcaaaagacacagaaaatctgaacagaattagaagtaaggtgattgaatcagtaatcataaacctttcaacaagtccagtaccagatggcttcactggtgaattctaccaagcatttaaagacaaattaacataaatacccctcaaactcttccaaaagatataacagtagaggaaacacttcctaattcattccatgaggccaccattaccctgataccaaagcaagacaaagacactacaggaaaacctttagaccaataccctttatgaatgtcgatgtgaaaatcctcaaaatactagcaaacagaatacaggagtatattaaaaggaccacgcaacatggccacatgggcatttcaatacaatacaccacattaatggaatgaagaaaaaaagtacatgattatctcaatcgatgcagaaaaaagcatctgacaaaacccaacatcttttcatgataaaagtacttgataaattaggaatagaagaaaagtcccttaacataataaagggcatatatgaaaaatctacagccaatatcatactcaatggtgaaagaatgaaagctttccccctaagatcaggaacaagacaagaatgtttatccactttcctgacttctattcaacatagtactggaaattctagccagagcaatgaggcatgggaaaaaaaaataaaaaggcatccagattgaaaaagaagaagtaaaattatttctatctgcagaagacataatcttatatatagaaaattctaaaaatggcacaaaaaactggctagagctaataaattcagcaaagttggagaatagatcagaacacaccaaaaaaatccactgtttttctacatattggagctgaaaaatatgaaaaggaaatttagaaaacttcatttccaatagcatcaaaaagaataaaatactcaggagtaaacgtaaccaaggaacaactgtatactgaaaacaaaaagttgctgaaagaaattaatatgaactaaatgaaaagaaatcacatgttcatggactgaaggacttaatattgttaagatggcaatattccccaaagtgatctatagattcattatattcccaaagtttcaatagctttttttgcagaaatgaaaaagccaaccctaaaattcaaatggaaatataaggaaccctaaatagctgaaacaaccttgaaaaagaacaacaaagttggaggactcacacttctggatttcaaaactcactacaaagcttcagtaatcaaaacagtgaggtactagcacacggacagatagatcaatgaaatataattgagagtgcaggaataaaccccaacatttttggtcatttaattttcaaaaaaattgcccaaaccattcatggaggaaaagaacagtcaattgttcttttctgacatttgttctgacaaatgatgtcagaacaactagatagtcacatataaaagaatgaagatggacccttgccatataccatagacaataactaactcgagatggatcaaggatattaaatgtaaaagctaaaactgtaaaactcttagaagaaaacagagggacaaaccttcatgaccttggatttagcagtggtttcttaaataacgatgccaaaagcatgagcaacaaaagaataaattagacttcaccaaaattaaaaatgtttgcatatgaaagttttacataccaagatagtgcaaagaaaacccacagaatgggacaaagtatctgtaaatcatgtatctgacaaggttctattacaaagaactccttttcccaaagaataaagacaaatggccaagaagcacatgaaaagctcaatgtcattagtaattagggaaaggcaaatcaataccaaaataagataccatttgatatccactagtatagtaataattacagaacagaaaataacaggtgttagtgaggatacggaaaactgaattcttatacattgctggtgggaatgtaaaatggtgcagtcactagggaaaacactttagtggttcctcaatgaattaaacatagaattaccatatggtctggcaattccaggcctaggtatacaccaaaagatacaaaacaagtgttcaaacaaaaacttgtacagtaatgttcacagcagctttattcccaatagccaataggtagaaacaacccaaatgtccaccaccagatgagcaataaacaaacaaaatgtggtatatccataaaatggaatactgaattagtcaattttatgttgctataacacaatacctgagactaggtaatttataaggaaaaggggtttatttagcttacagttccgcaggctgggaagttcaagggcatgactctggcttccagtgagggcttttgtgcttcattataacacagtggacaagatcaaaggggaagtgagaaaagagaatacccaagggtcttcctggctttataacaaccaactctagagggaactaatccattcccaagagagctaatccagtctcactagagcaagaattcactcactccagcaagaacagcaccaagccattcatgagggatccacccccaaaactgaaacacctcccaggctccagctcccaacactgccacaatgggggaccaagttttaacatgagctttggtggaaacgaactatatccaaaccacagcaaatattatgcagctatataaaggaatgaagtactgatacatgctaccacacagatggaccttgatataccatgtgagaaatgcttgacacaaaagccacacacttttttcatatagcactcataaatacaataaatatcagtatattttaaagtctgtattacttgctagagtgtaaatgccatgaaggcagggaatatatttatgtttcatttaccaaatatgttttatcacttggcttaatgacttttacacagtagaatctcaactattaaatgaatgaacaaatgttgttcacttttaatatccttcaatagttcaccaatgcactcaaaataaagtctcaactctttactaaagcgcttaagtcccatatgatttggctcatatttctttctagtcttattctgactttacttaataatctatgtttcaggcaccttgctgagtgctgggaatacaatgggaagtaagatagacacatagcacctacctttatgaactttataaaccagaaggaaatataaagtagtaagtttagggaaaaacaaggtattaagtatcatgagaccctaacaggtatacctgacctggattgtgaggtgggaaagggaagttcaggaaagctttctggaaaaagtggtatttatgtcaaaacaggaaagatgaggaattagcggggcaaagaacagggcaagttccagataaaggaagggcatgtaagaatcaaacaccaaaacacatagagattcaaaaaaaattatttttgtaaaaccaaaatatggaattactcaggtaggaagggactgaaaatatactgctatctgctgtcttgttaaaaacaaaatataaaagtaaaaatattgttaaagaatatatgtaatcatggtcaaaaaacaataattaaaattgaaggttctatcagacatcacaaatgttttccatcaggcctgtataaatacatgtctcctgtatgcttctagtctgaaaacagacaattcaaactttttattatttatagtaaaaattagatgaaattgagaaatgtatttttcaaccttttcagactctaatctcattttacttcaaacattacattgactggcttggttttaattttggaactctagatagtatgtatttaaaagcaaacaataggttgagaattataagtcacagtatgcctcagtgtccatactggtacgataatgttaagaaaaactacctctgacacaaatatattacatgaaaatcagctaatggtataacagcggctctttgttccagaacaattttgaatttaaagttaaaaggcaatttattttcttctgtcacaaaatttttaaccaaggtattttaaaaaccaacgttaagtaaaattcagtgaggaaataaacactgatgtaggcttatatattcatttaaaaatttttactgacaaagtctggctatttgccagtttcagatatatttacataaaataaaaaagacagtcaatatatgcctgtcttgccaggacaatagagttgatttatttattatacaattgtttgaatcccttctatgagtctactaacacttggaagatctttctgtgatgatgagagctcagccaagccagaataaaaatattcactgcaagtgtattatgacttgaaataataccaccaccttacattcatgtttcattttttaaaagtatttcatctttcgtccttgtatctctcagaaggtaacgcctgtcccattttcagatgaggaaaccgtgcccaaaggaatacatgcgacttttccagggtatttactgaatcagtactgaattaaaatttttttctattggatcactgcttactcttggttcagtgggaggtatctttttttttttccaaatcaggaatgatctgagtatttgccagcacccaaataatcccaacagactacaatttttttgagtaactgatactatatttaaaagaaattatggcctattttattgtcatcaaacttctgaacaaacctcttaataattactaaatgtcctacaaaaattatgttgtatacatgggagtcaaatggatgacatggatgcggaaagcagaaagagactggaaatcaacatctcaattcagccttccaaaaagtagaatccaccacttctttccccttcatcatttcaaaagcccatggcaatgaaccccaaactgaggcctgagggcggatgcaccagactttattcccaggctctcatgggatttatctattatgggaaaatggagagtctgggaagaggcgaaaaaaaaaacaaaagacgcggtttaccttgccctacctccctctccccctggaataaggtgatgtagcgaagaaaccatctttcaatgctgtcagggctccgccgagtcaggtcaaaggactttgaaacccccccagagctctccttttttctccacttcaccttttccctctcctttcggtgacttctctccctgcttcccatcccgtctgctaaactagcgttgcccagtgacatctcacagccaacccaagaacatcttcagggccctggcaaggagggtaggacagagccttggggagtcgtcaccttttgaggtatctggcgtcctccccttgcatggcggcagcggcagcggcgtggagaggatggggtatcttgagaggcaggcgcggttatttccggggacggtggccaaagtaccctcacacccagaggcgatgacagtcctgaggcctgcaaggcggggcagcagcggcgctgtggttaccacggtgaagcctccagctcctcccacagcttctgtgccccaaaacactggagcggcccagacccgcccagagtcgcctaagccgggccgtcacgacgcatgcgcttgctctgcacctcttgtatgcgcaggctcagtctgaggcggtggcctcagagtttgacgcaccggggagccgagcagggaagttttggtgcagttttgagcgtccgtgtataaggagtggctccgtagtcaccgcccccttgaggatgggaatagaaagggctgtcaggtcagcttgaaaggagagaggggaatccgataaccttttagttagcgaatgctatacagcagtccagctaataagggaggtttctatttgggggcctgaatggccctgattgcacttacaagctctaacttatggagataatctgaccgttgtacaaaatggatataactttgaaggcggcaagtctgtcactttgatgtcttaaatctagaatacacctcccccaaccaaaacaaacaaacaaacaaacaaacaacagcaacaaaaaacagttcctgaaattccaactccaccaattatcctgaactcaaggtatgtttagaattgcttcttctgaggcaggcaattgttagcagtgcagggcataggaaagaagggttcttttttaactgcatgttctctggtttaagatctattcccatgggttcagctattatgtctatgcaaatgatataggttcatttatttggtaaatgtgaattgagggctggctgtgtgccaaacaccaaaccaggctctagggatgcaaagaaagcacctctactccccctgctcacctataatcttgtcacttattcactgtcttctagtcctgttttcccagttgctttgagacgtgcacgtagttgctctgctgcttttttcaaatgtagtacattgatgcaattattgattatccgttatgtgtaaaacaccatgttaaggcactgcatggtatattaaatatagaaatacagtccttacccaacaaaatatatttttatcttcccacccattcacaccagctacactatttctgtagatgttatagtcattctttcattctgaaagggaagaaaatttgcagctaattttgactccttcctctgtatcatgccctcttactaaagtgttacaaaattctatcttttcttccttcaagatattcaggtagtccagtttttttctacattcttacttctaccaatagtctaatcactttatacctagagtactgcaattccttcctcattggacttcctattttttgtttttctaaatattaattctgcaaactaatgtaaaattttacaaattatcatttataacacctttaatggtaatatagcaggctagattactttaaaatcttcacaatacgtaaaattggaagaccaaaatatacattaaaatgcatagataatataacaaggatttttggaatgtaagttagctccttgagctcagagaacttatttcgttcacttttgcattcagcccatagttgtcactgaataaaaattttggtgttgaaaaaatgcaaacctgagcttgaaaaaacaatagcaacaacaacaacaaaaaaacctaaagaaaatgcccagaggccagaaagaaagagagagctggaaaccagagcaataaatagatagctgaaactgggactgaactagataaactgtctgtctgtggcaggaaaagtacaagatgagcctggaacattttatgcttgacagtaaggacatagtcagagactaagaagataagattatgtaaaaaggacactggtgaatttgaggcaatttgggaatcaaatggaattactgggattgatttaagacattaaataaataaaaaaaagaaatccataatgatactcaacaacatagaaaaacagggaaaaaagaaccccacttccactggaggcaactactgcatcagatctttactctgaaagctggtaattaaaagaaagaaggatttaatctaatgcttttggaaataaaccagatttcacctccttttaacaaggaaaagctcttcttaacagaaaatacctggtaggaatggagaaaaataatgatagttactattttgcaagcaccaataaacaatggattcaaataagccctattaatttactttaaaataatttaaagtgaggcaaagttttaccccgcatatttctttataattctaaaggaaaagaaatgttactttacaatgaggagatctagctgtcagcattttaaacagacaagcaaacagcatcattagtgagaggtgaacccagctggacttctgggtcgggtggggacttggagaacttttctgtctagctagagggttgtaaatgcaccaatcagcactctgggtctagctaaaggattgtaaatgcaccaatcagcactctgtacaaacgcaccaattagtgctctgtgtctagctaaaggattgtaaacgcaccaatcagcactctgtaaaaatgcaccaatcaacgccctgtgtctagctaaaggattgtaaatgcaccaatcagcactctgtaacaccaatcagcaggatgtgggcggggccaaacaagggaataaaatgtcagattattttgtaaagttgaataggcacatactctaaatctcagcaattctactcctagttctatacttcataaaattgttccaaaatcattggagaagtattgagcttagtagaaaatgaaaaacagaaagacaataacaaaatacttttgcaggagaatgaatgaatacatttgaaatattcacacaatacaataatatgcagcagagaaagttgatgaactagaactttacatatgacatggatgaatattagaaacatgatactgagtgaaaaattgtggcagattaaatacagcatgatgctttatttaaattgcactataatttaaaaacaataacatgcattcttcttggcctacagttctctaagttttgaaaaactcttaagtcatataattacctgcacaatcatagagcagttctgtcatcctctaaaattcctttgtatcctttggagtcgccttatccccacaaccccaggctctggtaaatactgatctgttttctgttcctataattttgccttttccagaacgtcatctgaatgtaatgataggcgctgtagccttttgaatctggtttctttcatttagcacaatgcatttgaagacaatccattttgtttttcggtcctgtttttttttttattgttaagtactattccatggtatgaatgtaccatagtttattcattcaccagttgaaagacatttgagttgcttctagcttttggcaactatgaataaagctactaaaaatatttacatacagatttttgtgttagttagtattctttactcctgttcagttatctaagaataggtttacttagttgtatggtaaatatatgaatgactgtacaaaaccaccaaactgttttccaaaatgaatgccgttctgcatttctaccaacaatgtatgagttcagatttagtcacatcctttccagcacttggtattttgttttttttttaaatttgtctgtttactctcatcattctaataagtgtgcagggctatctcacttgattttaattgaatttccctgattattaatggtatgagcatattttcatatgtttaattaccatttctataccatttttgaattctcttcaaattttttgtccatttttaatttatatttttgccagactgataaactgagcacagagatatcaacagttaagtagataaagaggacaaattactaatatctgaaatgaaagaagggacatcattcagattctacaggtataaaaatgataatttgaaaattatgaacaactttatactaataaatttaatgacttaaatgaaataagcaaataccttgaatgatatttattaagatggtgacaagaacaaagagaaaatgttaaagctctttatctcttaaagacattgaatacctaatgacaatatttcccacaaaatacacttcagacacaaatagcttcacttatgcattctaccaagcaagtaattaagataatgtcaatttagatactttctgaaaatataaaatgaaagcatatctaccaattaattttaaaaggtcagcattatcctgatatcaaaattagaaaatggtattacaaaataagagctacaaatatccttagtgaacatatgtgcaaaactctttaacaaaatattagcaaatcaaaccagcatacataaaaagaatgctatgaccaaatggggtttatcccaggaatgcaaggttggtttaatacatgaaaatccaataattaatttgccatattgctatatagtttgcatacttgaccctccaaaccttatgttaaagtttgatctccaatgttggagacagggcctaatgggagatgtttgggtgatgcagacagatccctcatggatgactttatactgtccttgtggtaattagtgagttcttgctctattagttcctgtgagagctggttgacaaaaagagcctagcacctcccccacctcttgcctcctatcttgccatgtgatcactgcacatgctggctccctttccccgtccatcttgaatggaagcagcctgaagccctcaccagaagcagatactggccccctacttcttgtacagcctgaagaacaatgaaccaaataaactttctttataaattacataatctcaggtattcctttatagcaacacatatgaacaaagacacatattaacaatataaaggtaaaaaatcatatggtcatctcaacagaagcagaaaattaatataatggaattcatgattttaaaaaactattagcaatctaagaatagaaagtgacttcttcaccctaataaagcatacttatatgggtttacttctgggttctctattctgtttcattgatctatctgtctttttcatgccagtataatactgttttaattaccatagctttgtaatatattttgaaatcaggaaatgtaatgcctcaatctttcttctttttctcaagatcattttggctttttggagttctttgtggttccatatggacttcagggttttttttttaatatttctattaaaagaatgtcaatgtattttgatagagatagcattgaatatgtaaattgctttggctagtatggatttttttttaacaatatgaagtcttccaatctataaacaagggatgtctttccatttatttgaataattttggtagaattatccctacgtatttattgttttcaggtgatattatcagtggtgtttgaaaaaccatatagattggaaaggaaaagtaaaactattttgatttacaaataaaaagctactagacctaataattagtaatatcatagaatataaagttactacaaaaatcaattgcattgacttatactagcaatgaaaaattgaaaaataaaatttataaacaccattgataataccaccagagagcaataaatatgtagggataaatctaccaaaatttgttcaagacctatgcactgaaaaccatgaaacagcactaagagaaattaaagatgccctaggaaaatggaaaagtgtgtcatgtctatagattgaatgattcaatattattagaacatcaattttactcaaatttatctatagattctatataactccaatcaaatactagcaatttttttttacaaattgacaggttgattattttatatgaaaatgcaaaggacctctaagagtttacacaattttgaagaacaaatttgaaaggcttcatgattaaaagacctactataacttcattagtcaattcaatgtgtattggcataaggatatacatatacatagattaatggaagagaataaaaaataaagaatagaaagagaatgactcacttatggttcagttaacttttcagataatttcttaaaactttttaaaattcacagaaagttgcagaaacggtgcagagatatctaggtaccttcacctagtttcacccagtagttacatcttccataaatgtattgtaatcagaaacccaaaaactgatatcagtacaatgtatgtatataattctatgccattttatcatgtgtgtaaattcctgtaaccactacctcaatcagtatctagaattattctgtcaccacaaagatctactgaaatttacatttcattggattgaatgaagtgtagaaactgcatctccctttgtcagtttactctcttccatttttaataaaattatctttaacatttcctttatgtacatttagaactatatcagtgttatcattttgctttaatcataaaacaatttagaaaacttaagagaaggaaggtctatcaccaaaatttaaaacttccctttgaaagacaccattaagaaatgaaatggtaagtcacagactgaaagtatttgccataaatctatatgacaaaataattgtattcatgatataaagagaactattacaagtcaacaaaaaatctaaatgacctaactaaaaatgagcaattaatttacaaaaatgtcataaaaggagatacatctctagctaataagcacatagtgactcaactttattagttatcatggaactggaaatttaaccacagtgaaatacactattatacacctatattagttttctattgctgcagtaacaaatggtaacaaacttagtggcctaaaacttaaatttattgtcttacagttctgtagatcagaagtctgcaatgaatcccactgagttaaaaatcaagataccaagagggctttacttttttctggatgctttagaatagaatcagtttccttgccattttcagctgttacaggccatccacactccttcactgatggcctctttcctccatcttcaaagccagcaacagtggcccaagttcttttcattattgccatctcacaggtccttcttctcttatcacatctctctatgaccacagccaggaaaggttttccacttttagggatgcatgtgggccccactggataattcaggataatctccccatgttaaagtaggtccttaactttaatcacatctatcaagttccttttgccatgtaggtaatatatttacaggttccagagatgggatgtgagcacctttttttgtgggggtgggtgagaagggtgggagcattattttacctgccacaatacctaccaccataatgattaatattaaattgtcagacaataccaattggtggtaagaatgtggagctactggagttctaatacttgtgagaatgcaaaatggtacaaccttttggaagacagttttatagtttcttcaacagttaaatgcatatttacaatacaaccagcaattccactcctatgtgtctacccaagaaaaatgaaaacatatgtccacaacaattgctcacaaatgttcatggtagctttattaataatgacagaaaacttgaaacaacccaaatgtctattaacatgtcaattgatacaaattgtgggatattcacacaatggatactacttagcatcaagaaaaatcaaaactactgatatatgcaacataaataaatctttaaaaacctcattatgacgaaagaaccatatggtttgattccatttataagaaactcttgaatagaaaaaaagcacaccccgatctattatgacagaaagtagataagtggttgccttgtgctagtgatagagggtggatagactgcagccaggctggaggaaactttagggtaatggtcacccatgtgaatacaattattaaaactcatcaagctgtatacttgcattcattttattgcatgtaaattttaaaaattttgtataaaaataaattatactttctctttgttgtatataaattatttcctaatgtgattgttttaaaagatataatgagcaaggaaaaaagtagtaagccaaatgggtggattaaatagcatattaaacacagttggccgggcatggtggtttatacctgtaatcccagcactttggggggccaaggtgggaggatcagttgaggtcaggagttcgagactagcctggccaacatagtgaaaccccatctctatcaaaaatacaaaaattagccaggtgtggtggggcatgcatttaatcccagctacttgggaggctgaggcatgagaatcgcctgaacccaggaggcagaggttgcagtgagctgagatcatgccactgcactccagcctgggcaacagagcaagactctgtctcaaaaaataataataaaataaacacagttgaagagaaaatttgtaaatattaagaggaaataatacaacacagtgtgatagagaaaaccagttcttaaaaaggggttaagggatgggaaggataacatgtaaagatccataagcttttaatatgactgctggaaaaaaagaatagagaggctagagacaagccaatatttaagactggaaaacatcctgagttaatcaaagacgtgaatcccaagcaggataaataaaacaaattcattactgaaattagagaattccaaagatagagatctcagaagccatcatcagttagtaattttttgtgtgctaatttttcatttctatttcgttctcatctcccaaacgggttataaattgttgagtgaagaaaccaatctcattcagcacttggacttgcattattctgtggtgtagtggctaagaacctgaattcttctggagtaagaacttggttagtgtgcctgttctaccgcttatttacttttgaccttgggcaagttaaactctgtaatgttcaattttctcatctgtaaaataggggtaatagtctttatgtcctagagttattgtaaagttaaatgagatagcatacataaatttgtaccagtgtatttatcacattaagggcagcaattgatattagctggaccaggtgtttgcaaacttagttaatttattacctacctaccatttattaattaccacctgccatttattaatcatatgactactcacccacatatcccttattaattatatgactctagacaagtcacttaagcactctgtgtgtacttcatttagaaaaattgggggaaatacccatattgccaaagattattgcaaggatacgaagagttgatattttgttagaatcttataaattttaaagttacatgaaaatgatgatgttattattatttcaactttattcttaaatttgtcaactgtattttgaatactagccacagcggggtgtttaaaagtactgagaaaagtgattgctgcctcacaattttataatttgacaggagagaaagagtacaaagatgcctaacaccaatgacagaatcatttaaagacgaataatcccaatgatacaccaacatggctaaagatggtttctgagggctttagagatataggagtcagtctgggttgcattgggaagccttttgttaataccacagtttgttccatcaagcaaaactctttttcctagaagccttttgtaagcttcagatgcagtacagtgccttctctgttctactgcatatactgtactttatgtgcattatttgtttatacctctatcctctccaataagagggattaaaaaggcataaaatcatggatgtccaatcacagtgcatggcacgtagtactaacacaataaatggcaactgctgctatatcaaatacagttactgccttcaaggagcacatgaactagtcactaggtatataaacaaataattattgactatattaatgctttcataatagcagcatgacacaagtaggatgctggcacaaaagggaataatccacttatcttggaggatagagactcacagtaggactcacaaaagctgaataaaattttgcttagcagagagcataacagggatattatagagaaaggcaatagtacatacaaggacacaaaagtatgaaatatcatggtacagttaagtaactgtatgtagtttgagacagaattagttttgggtggaa

SEQ ID NO: 372 - DNA, 212769 bp, Homo sapiens
ccttattaggcttttttgatttacctattttcctggaatatcagtttgtctttaaatagctaagaatctgacttatatgctgtcaatacacacagttagtaatacagcatgaaaatcctaacatgcttttctatactttagccgtgatcattttcatttgaagtcctaaattacaaactgatttaaaagctatatatatatatatatatatatatatatatatatatgccacatccatgaaaccttccttaatcaaatctcaagcttcacttttctcccttcaagctccctgaatacaacattcttcctatgagataattgtagtctactatctattacagtaaatttccaatgcattttatctcactgattagattataaactcaacgtggggatcgtgtcttgtttttatatcctatattgattgccaaagataatgatttgttttgtataaaagtgaatgaataaagtaacacatttgctttatttcagcttctttgcccaaaatgcagtgccaagttgggttccttcaactggtatggtgaacagtgctcttgtggtaggtggataacacctgcttttcaaatacataagaatagagtggatgaaatgaaaatattgcctgttttgggatcacaaacaggaaaaatatgaacatgatattttatagcttgggaagaaacttgcagatgatatgtgctgcctttgcttcttatcattcatggcagattgtttgtgctttcaacatttcatttgaaatgggagaagataaaatcacttgatgtaacctggaaactatgctttacatggcaatcaaagccttttgatcatgtacattttatttgatattaaaatcttttataaccagatactgtctgtgtttcatatatttttaaaagttttgattgttggaatgttatatgatcttaaggtctgtatagacaaaattatgtacaaaaatttgaaactattatatttaaatgggtattcttttatttccagacacataaagcagatttgtttggacatattttggaattatttcactttctttcttttaagggacattagtaaacccatacatgtctggatttttttcttggaaatggaaaggccattagtaaaacgctgattaaaaggcaattttcctattactgttcagtaatcccaattatctatatttttagaaaagtgtttgagatcccttttgaagtgatctacataaagaaatacataaatgttagatgtgtttctaatgatgaagaaaacaaatgtagagttactatatatcaagtcattttgtagcccaatatgtgagtattggaaaaggtaatacgtccagattagttttttaacctgatgtatagaaactagaattattttactcattattaataattacaattggacctaattagatatttgaacatttacaagaatcagaattaactaataaaggccaggtgcagtggcttatgcctatgatcccagcactttgggaggccaaggcaggcagatcatttaaggtcaggagttcaagaccagcctggccaacatggtgaaaccctgtctctactaaaaataaaaaaatcagccaggcatggtggcacacgcctgtagtcccagctgcttgggaggctactccaaaaaagaacaagaattaataaagaaaaatattctttatttttgttgtaaattaagttgtaaattcactagtcatgctccccaccatttgcagggttccaacaatagtacacattgaggcttatatacataaacaccgtagtgggagtaatttttaaatgcaaaaatatgttgtgaataatgatcctcttaataaatgcctagctcagttttttaaaggtataggagtgttatggaaaattcttgagaaaaatcttaacattggacctgaaggctttggcagtttccatgtaataatttttctttctattttttttttttttttttgagatggagttttgttgttgcccaggctggagtgcaatggcatgatctcggttcactgcaacctccactgcccaggttcaagcgattctcctgcctcagcctcccaagtagccaccacatctcgctaattttgcatttttagtagagatggggtttccatatgttggccaggctggtctcaaactcctgacctcaagtgatccacccacttcggcctcccaaagtgctgggactacaggcgtgagccaccgctctctgccataattttttcttttgagaaaaaattactccatttgttttagctttcataaaatctacttttttgcttcatactattattctctattcatatattattctctagaaagttttaacaaacaggttgaggagctcaggtgtggtggctcatgcctgtcccagcactttggaagacaaaggagggtggatcatttgaggccaggagttcaagaccagcctggccaatatgtgaaaaccccgtctctatttaaaaaataataacagtttgcggcacatgaagttaccccttttgtaggtaaaaagtagttacatagctgcagtttaatatgactcaatgcctatccatcatacactgttgatcagattataaaatcaaatagtatggatcaaatgcaatgttaattaagttgtaaattcactagtcatgctccccaccatttgcagggttccaacaatagtacacatcgaggcctatatactatttgtcttaactttgtttttgtttttgtttttgttttttttgagacggaatcttgctctgtcgcccaggctggagtgcagtggcgcaatctcgactcactgcaagctccgcctcccgggttcacgccattctcctgcctctgcctcctgagtagctgggactacaggcgcctgccaccacgcccggctaatttttttgtattttttagtagagacggggtttcaccgtggtctcgatctcctgacctcgtgatccgcccgcctcggcctcccaaagtgctgggattacaggcatgagtgtcttaacttttaaaacataaattggccgggtgcagtggctcacgcttgtaatcccagcactttgggaggccaaggggggtggatcactgcaggtcaggagtttgagaccagcctggccaacatagggaaaccccatctctactaaaaatataaaattagccaggcatggtggtgggcccctgtaatcccagctacttgggaggcggggaggcaggagaattgcttgaacctgggaggcggagtttgcagtgagccgagatcgcgccactgcactccagcctgggcgacagagcaagactctgtcttaaaaaaataaaattataaatcaagctatctgttaaataaaatgttttattctattatcttgacaaatatcccttcataatgacctgtcagaccaggtttgaattcagaattctctgattttatcagattccatgacaaagcatggcaatgcagggagaggtggcccccgcccactgggtgcctcctttatttccccaccccttgatttgttctgcatcatgaagagcctggtgcatatatatatatgtgggtcccccacctatatgtataagatctggctacagccctggtgtataccattagcccatttcactcgtaagaggtatgaggccagagcaagccctggaagccggcttggagctatttgggctatttgggtgttagatgcacttctagaagggggcatctgttctagctgggcacatcacgttggcagtatggattcttatcctgtggggcagagccagaggtcagagtaaagtcttctaaagtgtcggtccagggtaggggctcctcttacctagaccaaagagtggtattgtctctagacataaggttctttttcaaattgtatttctattccaagggtttaagttgaaaatgaatgagtagattcaagaaaaagaattccataacatccaacatttaatgatttaaaaagaaaagcctggtaactagagtggaaggaagcttccttaatcagagcagctgtgaaaaatatatgggaaaaaatcttatttagtggtaaaacttttcaaacattcacattaaaatttagaagtaagttaaaagatgtctagcccctaccttctgtatcgtattagagggcctaaccattgcagtaaaacaaggggctaaacagtttaagacgtaggaaaaaaatctgaactcactaataaatctcgacatctctaaaagtgggacagtatgtatatgccttctgctatgatgcaaggaagtacctatgaagtattcttgcaaaagcaaacaaaaaaccaaaaactaatcaagcctctagatgtcactggcagtttctggaacaaattaagcatcaccatgaagatgtaatcagcagaatcatgaagtgggaaattctataggaccaatgacttagattcttcaacaaatggcaggggggaagaaatggagagggaattgtcatgtgaactaaatgcaatgtgacaatcttgttggatcctgattttaactaactgtggaaggaagggcatttttgagacagaaaactgaacatggaacaggtatcagatgatattaaggaattattaattttgttgggtatgataatgggattatcagtatgttttttaaaaataagaaaaggcaggctaggtgcagtggctcatgcctgtaatcccagcattttgggaggctgaaacggatggatcacaaggtcaagagatcgagaccatcctggccaacatggtgaaaccccatctctactaaaaaaatacaaaaagtagctgggcgtggtggcgcgcgcctgtagtcccagctactcgggaggctgaggcagaagaatcgcttgaacccaggaggcagaggttgcagtgatcacgccactgcactccagcctggcgacagagcaagactccatctcaaaaaaaaaaaaaaggccttgtctcttagagatatacattgaagtatttatgggtgaaataatatatctagatatgctttaaaatactccaggaaggctgggcaaggtggctcacgcctgtaatcccagcactttgggaggccgaggcaggtggatcaccttaggtcaggagttcaagactagcctggccagcttggtgaaaccctatctctactaaaaatacaaaaattagctgggcatggtggcaggcacctgtaattccagctacttgggaggctgaggcaggagaatcgcttgattgtgggaggcagaagttgcagtgagccgagctcacgccattgcactccagcctgggtgacagagagagactccgtctcaaaaaaaaaaaaaaattctgggaaaaacacagaacaaaatgaaaaaagttgtggagaggagaggtaggatagataaaacaagaatggcaaattgtttaagctgaagctggatgataggaacacagggatttattatatcatctcttgtatttgtttgaaaattttcatactaagtttattttacaaattaaaacattaaataaaatagaatttaaaaggttggtgtttgcataatgttctgctaaataaaaaatcctaaagaactttagacaaatttttttaaagtcatttttattttatcacatactagtttccatctaccataatatgatttttttttttagagacagaatcttgctatattgcccaggctagccttgaacacctgggttcaagcaatcctcctgcctcagcctctcaagaagctgggattacaggtgtgtaccactgttcctggcacagacaaaatactagaataacagaattcaacaaggtttttggtacaagattgctgtacaaaaatccacagtgttgctataccccaataatagccaaatagaaaaaaaaagatgtgaaaaacaaaactataaaactatgaaaatgaaaatgaaaatcttagtgacctcaggagagggaaggatttcttaagaaagctacaagtcagctatcataacaacagattgataaatttgactacattgaaattaaaatctagagaacaaatcaccgtaaacaaagacgacaagtgtcaacctgggagaaggtatttataacatataccaagcgttaacttaaaaaagcccaacaatgggctgggtgcggtggctcatgcctgtaatcccagcactttgggaggctgaggcagaaggatagcttgagcctaggagtttgagaccagcccgggcaacaaagcgagactctgtctctctctctcttttaaaaatgtatatattaaaaagccccacaatgaataaatttagaaaagaaggggagactttatggcctgcaaggtggccatcctgcaggctgggaagcgtgcctccagaaacaggcgctttgaaggaggagggcttggagtgtagttcaggctgaacaggttggctaaacctacattttcaccaggttacaggaagagctatgaatattcatgaaagtggtcctgacacatgcgtattgaacaaaaactcatgtaacatatgacccatattcactttgggatggagacttaacttttttgttgttgttgttcagacggagtcttgctctgtcacccaggctggactgcaacgatgtgatctcagctcactgtaacctccacttcccggtttcaagcgatactcctgcctcagcctcctgagtagctgggattacaggaacctgcccccacgcctggctaattttcgtatttttagtagagatggggtttccccatgttggccaggctggtctcaagctcctgacctcgtgatcttcccacctgggcctcccaaagtgctgggattacaggcgtgagccaccacacccagccaagacttaacatttaaatgtattacgagccctatacgtcaaaaggtctttcaggacatgaagccatgcaaatgtgcgacctctgtagaccagccagaaccagtccatggccagtggtcttcttacctggagaaagttactgaaatcaacaaaaagttgtccaatgaaagctgtagctatggctggtggaacggggactgggggtcagtaagtcagcatctcgtggagctgcacattattttaatattgtttatctttaggccagtacttgtttagctgctagagaagaatcttgtggcagttagaacacagtttattctttaagtataggggtgtgggactaaaaccttgcctggaatggctttaggtcttttttataatttggcatcttattgccagagtctgttctgtcagtcttatcatctctgttttaacattaatgctggccagttgttgtgttaaactacaaaagggagggagtataacaaggtgtgtctaacctgtcccatcgtggtctagaactcagttttaaggttttctaggatccccttggccacaagggggcctattctgttggtggcggacttaggagtttagttttactttatacaggtgaatgaatagagcaggctatctaatgacgtacacatcatttgtgaaagaaaactccatagcaaactttataaaaggtaagagtggacagttcacagaagaggaaataaggtttcataagtatggaagaatgcaccactttgttagggaaatgtaaattgcaattttcacagcggtaaaaatggtaagagtctgaccatatcttgtgttggagagaatgtggaacaaagagaactcatcaatgctagtgagggtgtaaactgataaaatagtacatacattatttaagacattcttgaggctgggtgcggtggctcacgcctgtaatctcaacagtttgggaggcagaggcgggcggactgcttgaattcagaagttttgagaccagcctgggcaacatggtgaaatcctgtctctacaaaaaatacaaaaattagtcgggtgtggtggtgggttcccgtagtctcagctattgtggggagaggcatgaggatcgcttaaacctgggaggtcaagctgcagtgagctgagatggctccactgcaatccagcctaggggacaaagtgagcccctgtctcaaaaaaaaaaaaaaaaaaaaaaagagggagagagagagagaaattgagattcattcaaggaaataccatgggtagatccttaatatccaataagaaaaatgatttggagaacattaaagtttacatacattaaaaaaacccaaatgacactaaatgcatgtgtctataaacatgtttaagcaccgtaaaactaaaaataaaagtggactagaattacacttttatttttataaaataaaattttatacccataaaattcatggtagaagtggcctacgccaagggaggaaaatgaagcagggaggaaagaggaattcaattctgtagtatttaatttcttatgaaaaatctgggacaaaaatgaaaaatgttaaatttttaaattcttggtgataggtcacaaatgtttgtttcataattacttgcactttttgaataaaaataaaatcttttggaaattaaaaaaattggcgatttgtcatggtgattttcttaaaagactaaggtgtctagtgggatacagaagactcgatgattttattttattttaggttttttttttttttttttttttgagacgcagtctcgcaatgtcgaccaggctggtgtgcagtggtgcgatctccgctcgctgcaacctctgcctcccgcgttcatgcgattctcctgcctcagcctcccgagtagctgggattacagctacttgcccgccaccacgcctggctaactttttgtatttttagtggagacagggtttcactatgttggccaggctggtctcgaactcctgacctcgtgatccgcccgcctcggcctcccaaagtgctgggattacaggcgtgagccaccgcgcccggccttattttagttttttatgtcaatttttgaatttgtaattgggtgagaattaaagtgttataaatttcaccttaagtgaaaatttattagttttctaatgacaaaagtagttacatctgacgtaaggggatttaattatctttttctgggcttgcgtcccggaacgctgctgcattatgtaatctgtagtaatatacccacgagcagtttggagggttctgggaagcacatttgttttgcttacctaccatgggaaagattccacgtggtcctagaagcatacgtattcgtcggttacagtattttaaatattcactggccgctgaaatttaaaatggatgaaaaagaaattctcttaagtagcgttcttgaaactgctttatcaaactcagttcatattttcagttggagttcgtgatgtatgtgattttcctttaaataaaacccgaatctttagtaatacaaatattgggaacttcgattactgtaggtcttagggtagactcgcttggactttgactaaatactatgctttagaaatttatctttaggagataaatttggggggtttatctttttatatttgctttgtttcaatttatttaaataaaagtagtctttctagaagtatgttttatagtaccacttacctcggttactgtcccagttaagcagttttcacgaatgtggaaaaatagtagtgtttttctttcatacacgcgtatatgaaaaatttttacattgatagagaattattcgtaaaaattaaagtaaatttactgttagtctctaattttgttctgagatagccacgctgtggcattaagaaggataatcaaggaataagccataatgttcagaaaggggctttactttttatttttaatattattgataaactttgtttagtcgaattgatgtctgcgtgtcttcccccgccttccccataaaacagcgggacagaaagtcctgaaaactccaaaagggaaatatttactcagaggtctattcaaatttgcttagtctctgacgttttcctgtgtcgtacaaatccctcgtgcggcaaaagtagtttgtctttactaggccaccgtctcgtcagcgttacggagtattttgtccgcctgccgccgccgtcccagatattaatcacggagttccagggagaaggaacttgtgaaatgggggagccggctggggttgccggcaccatggagtcaccttttagcccgggactctttcacaggctggatgaagattggggtgagtgggatctgagaatgtaccagggtggctcgggttcgcgtctaaaggtttcttcctccctacttccgcccactcgtggtgacaggtgtggaccaaccctgcctggggagtgaggcccctcgtcactcctgttcgtgcccctggaagagtctgggagtatcgttcggcttctgtcctggccacagggagagtagaatattgtctaactggagttaactgtcgtttttcactattcccactggggaagtaccgggtgatctttttgtgtggctaacactggacgtctttaggaggtttagagcaaaatggctgggaccgccaaaaaggctacaagctatttcctgagtgtgaaatgtgggcggtgagcacaatggagtgggtttttgtgtgtttggtgtatatgagagaatgtggttatatacaagaaattctaatcttacagcttttactattggtttaagcctgatgtccgtcttggcagaaaagcaaaacacccaagcacctgacctcgggtccctgcttagctacacctaatacttatggtgtaatcctgactgctctccagatacagctcttaattttcttgttaatggatattttgtttggttttggtggtcaggaagggtggaatgggatgaagtggaaatgagaatgaagaaactttgttatctaagtatttagaggagacttttattctcctcttgattgcaagatataatagtaatattgttcttaggttccaatatgaatttgggattgtgtaggttcccaaatgggcccgctagtgagcctacaccactcatcagccttggaactggggggaacccagtttatctttctcccttggatcagcattctcaatagcaggagtggaaggaatctcaactttttattgaacaaagtcatttaattgtttcaaggacagatgttctctaaaactatattctattggagatttattttaatccttgggtagattttttaagagttgctggaaaacttaagattttttattcccattttcccaagccaaatgcattagtgacagtaaccatttatttagctctttgtgtcagggaccctgttaaactcttgacatgaagtattttgtttaatcctaccaacagtccaatgaggtactgtttattttagagatgaggaaactgaggctaacagaatttgtgctcagattcttagagctagttagtggcagaagaaggatcagaccaggtttttctacctccaaagtctgtacccctagcatctattctataatgctttcctaactcatgtctacagattttattcttcctaagatccctggttattaataagactacttgaatatattgggtagttatgatttattttgtcagctagtcagctattatattttcatgacatttcttttctttacctctttttttgagatggagtttcgcttttgttgcccaggctagagtgtaatggcgcaatcttggctcaccgcaacctccgccactcgggtttgagcgattctcctgcctcagcctcccgagtagctgggattacaggcatgcaccaccacgcccggctaattttgtatttttagtagagacgaggtttctccatgttggttaggctggtctggagctctggacctcaggtgatccgcccacctcggcctcccaaagtgctgggattacgggtgtgagccactgtgcccggccagtgacatttcttaaagtataactgtgggacacttcctggtagcataattttatgtcgtcttctgatacccaggctgcattttccagacttatctgatcacttgacttaatgttctctaacagagcattcagttctttgtagtcagttcaccgactcacttctatcgggtatcctgccctgtccctccctgaatgtgcccatttccattgttttccaggtttcccttttcaaactgttaacagtcttctcttctttgaagactttaatttaattccttaggtgttcagtaagtaggatagattttgttggcaatagagtgaaacactactgtctgatagtgtttcgttctgtgacagttgctgttttggatgttcaagtacttcactgatttacttgattttgttgttgttgttgttgtttcttttagagacagggtcttgctctgtcgcccaggctggagtgcggtgatgcaatcatagttcactgtgacctggaactcctgggctcaagtgatccttccatctgagcctcctgagtcgctaggactacaggtgcacaccgctaccatgcctggttaatttttaatttttgaattttttgtagagacaggggtcttgctgtgttgcccagactggtctccaactggcctcagtcatcctgcctcaacctcccaggtgatgggattacaggctcaagccactgtgtctagccttgatttttttttaatattagacactatctagttaaaatttaaaaatcagattatgtaattagtatgtcctgtgattttaacaactctaaataatttaaataaagtgattaactcagaacagcctgtgagggatgtgctttcctttttctttttaacttaggtaatgaaatttagagcaagagtcttcaaacattttctgtaaaggttcagatagtaaatattttaggctttgtgattacatggtcactgttgcaactactcaagtctgctgtgatagtgcaggagcagccagagacagcataaacaagtgagcatggctgtgtttctataaagctttatagacactgaaatttgaatttcacataattattttaaataataagcctacttttttagtataattatagatttacacaataattgagcagatagtacaaagagtccacatacttccccttcatccccagcttctcctattggtaacatcttgcattagtgtggtacattggttacaattgatgagccagtattgatacattattattaactaagcccatcatttaaagttcactctgttgtacattctatggcagggatccccagccttttggcaccagggactggtttcatgaaagacaatttttccacaggaggtggggacagggaggcacaggaaatgttttcaggatgattcaagtgcattacatttattgtgcactttatttgtattgttattacactgtaatatataatgaaataattatataactcaacataatacagaattagtgggagccctgagcttgttttcctgcaactagatggtctcatctgggggtgatgggagacagtgattagatcatcaggcgttagattctcataaggagcgtgcactctagatccctcacatgtgcagttcacagtagggttcacactcctatgagaatctaatgctgctgctgatctgacaggtcgtggagctcaggcggtaatgcaagtgatggggagtggctgtaaatacagatgaagcttcgctcactcacccacctgctgctcacctcctgctgtgtggcctggttcccaacagggttgggaaccactgttctatgggttttgacaaaggtataatgacatgtatccataattacagtattatatagaatagtttcactgccctaaaaaagccctatgctctacctattttttcctccttcctcttccctacctctggtcaggtaaccactgatcttttcactgtctccatggttttgccttttgcagaatgtcatatagttggaatcatacagtatgtagcatttttgaattggcttctttcacttagcaatatgcacttaaggtccctccatgtcttttcatggcttgatagctcatttcttcttagcactaaatagtattacaaaaatactatttacagtgttacaaaaaatagtatgtatgttctatagcctattagtctgcctaggctgccataagacaacaccacagactgcgtggtttaaacaatggaaatttattttctcccagttctggaggttagagttcaagatcaagatggccgcaccttcaggttctggttagggctctcttcctggcttgcatgcacatggctgccttcttcttgtgtcctcacatggcactgagagagagaatcttcttcttcttataaggccacagtcctatcagattagtgccccactttaatgacctcatttaactttaattacctcctaaagactgtatctctcgatatagtaatatttggggttagggcttcaacatacgaattttggaggacacagtttaggccataaattcacagtttgcttatccacttacctattgaagcacatcttggttgcttccaacttttggcaattatatataaaactgctgaaaacatttgtgtgcaggtttttgtgtggacatgcattttccaattgtttgggtaaatatcaaggagcacaattgctggattgtgtggtaagaacatgttttttgtttgttttgtaagaaattgccaaactgtcttccaaagtggctataccattttgcattcccgctagcaatgaatgagcatttttgatgctccacatccttgctaacatttggtgttgccagtactttggattttagtcattctaataggtgtgtagtggtatgttttaatttgcagtttcctgatgacatatgatgttgagcatcttttcatatgcttatttgccgtctgtatgttttaccctcctctctccttctctcttctcttttactcttgcttgaatttgtgcaaaagctgctttattctgctttcttctttcttccctcctcctcctcctttctcctttctcctttttccttctctttattcttctgtcagctgtacttaagatatgtgtatcaagatcagaagctttcgtctgccactgtggtttcgtttatgtcttcagtctcttctgtgaaggttctcttggctttctagcactaaatcaaaatctggtgctcctggatgacacaacttcccgtaatgccccggtgaacggttgctaattttattctcaaaaccttttcaccatagggcctctgttggtgggataggtgtctccattgtccttcactgctattctcctttcctcctccctaaaaatatctaagttgaaatctcattttgtcacaatatcccatcctctacctctcctgattcctggatcactctctttcacttttctttttttcttttagagatggggtcttgttctcttgcccaggttggagctggagtatgcggtggagcaatcacagctcactgcatcttcagacccctggggtcaaaggatcctcctgcctcagcctcccgagtagctgggactacagacacatgccaccatgcctggcttctttttggctttttgaaaacattttgccactagcttactgttactttcttcaccattacttccatcatgattcttggatgatttcagtatccttagagaagatccttcagatacactgacctgtcattttctggacctcctctttatcactgatcttaccttttacccagtctcagccatttgctttcctgatcataagcctaagtcttgtcactaccaataacatctcactttcaaacatcctgctctgactgccttcgcctgttttaccagcttacttcctttagtattccagtttcaatagttgttcagtccttctgagattttgccatgtttccagtgtctctcattctcttcagttcatcacgtccctcttacccagtttaaataccatggacagtcattgtcactatttccttcctttcacctttcatattcatgtctgtctcttttctggtaggtttctcttggataaacctattagttaaattcagttttgcccacttcatgcctgtcctagtatagctgaatcagctgaagaaaacacttcaactgtcctgactggtctcaatttaagtgttgccagaccaatcatatttccctggtcctctcactgtcccattctgatgattgctttataaagtttcttctatcttcaaacctccaacatctctcccatcctttgaatcagaagagaacttctacagtctcccactacctcatttacccacctatcaacatgtttgctttctcttttgttggtgagaatgagtggcttcttgctcctagctagagccagtccttccatatgtgctttagattcttcctgttttgttcaagaatattgctcaagctattcttcctcctgtttcctgcatcagcatttcccctctctactagatcatctctgtcagtaaatgaacatgttgttgtttctcctagaagtactgtttctatatctagatagtactctagctagagttaaaaaaaaaaaaaacaaaaccaacaaactcaaaactctcttcagatgttacttcacctcttgctgttactgcatttctctactgtatgttacagcagaattccttttaaaaaatgtccacgttcactgactctagttttttatttctccttgtctcttgaacccagtccagtcaggtgccaccactccactgaaactcctgttttttttttttttttttttttgagacagagtcttgctctgttgcccaggctagagtgcaatggcacgatcttggctcactgtaacctccacctcctggattcaagcgattcccgcctcagcttcctgagtagctgagattacaggcgcctgccaccatgcccggctactttttgtatttttttttttttgagacggagtctctctctgttacccaggctggagtgcagtggctcactcggctcactgcaagctccacctcccaggttcacgccattcttctgcctcagccttccgagtagctgggactacaggcacctgctaccacacctggctaaatttttttttgtatttttagtagagacggggtttcaccgtgttagccgggatggtcttgatctcctgacctcatgatccgcctgcccaccttggcctcccaaagtgctgagattacaggcgtcagccactaatttttgtatttttagtagagatggggtttcaccatgctggccaggctggtctcaaactcccgacctcatgtgatccacccgcctcggccttccaaagtgctgggattacaggcgtgagccatcatgcctggcctgaaactgctgtttttaagggcactactgatttccacattgctaaacccagtgactgtgtctgatcttattaaacttataaggagtaaatgaataaataaatgggcaaggtggaggtgaggtgggaaagtttgttgagtacactaaaaatagtaactaccattatttactactgttgagggaaatctaatagtgtgggactggtgcaaaggatatagaaataggcaataggttttaggatactttggggtaactgatgctaacagtttcttatggattcttttggaatgttctataaatatacgagtatatttatcaacccaccttcagttatttttttaaccacagaaaagtcaaaagatcagtacactgataaacgtgcgttttccttatctagatttaccaactgttaacatcgtgccacattcactttatatcttaatattacccacactttcctcctttttcacatctgaaagtgggctgcagataatatgaaactcctaaacacttcaccatgtatttcctaagaatgaggaaatgtttatttttaaaaagcatcaattcattttaatatgctttatacttcaaagctaacatcacagggttctttttcaccttcttgcaccatatgcttgtatttctcttctgccgctatgagaatcctgattcccaataacatcctttgtttttataggctcacttcagcagctctgttggaaataaactgaaagaggggcaagggcagaagcagggagacgttttggaggctgttatagcaatccccatgagttacaatagtagcagtggagtaatgagaagtagttggattatggatatgtacacacacacacacacacacacacacacacatacacacatatatatacatacattttaaaattttgaaatagtttgaaatctatagaaaagttttaagaacagtgcaaagaactcttgcatgccttttacacagactcctcagttgttaaattttactgcatttactcaatttctctctttctccctttcaagagagagagatgtgttgacccatcacctttaaatactgtagtgtatactctctatcctcctgcctcccaaaagaaggccactttcctctattactaccctatatttcttccagtcaggagataaacattgatacaacagtgtcatccaattcaaagacaccattcaaagtttgccatctgtttcaataatgatttgcttttctagtctaggattttacttgcaaacactcattgcttttacttatcatgtctcatcagtgtcctttaatctggaacagttctttagtcttttcctgtctctaatgtccttgacagtcttaaagagtagaagtcttttattcgacaagatgatcctaaaccactaaggggttccttggaaaaatgaccaattccagggctgggaaagtgcagggaaagtgcaaaataagcctggaaaatcttgggccagaaattctcagcaaatgaacatgttaaaaagaacaaaggccccaatatgaatgaactccccgtggtcaaatctgggaaaatttggcatcagaataaaatgagggtatacattatagtgtaaatactatgcgatgttcctatgccatcatatcatcctgtgatatagtcacatgatcacttggtcaagttggtatcttctaggtttcaccactgtaaagccactgcttcccattttgtattttattgctattttgggggagataatctgacataacaccaatatccttttcttattaaacctctaaccacgagccctagcctcattaataaccccaatctatatcagttaccactctaatggttgccaaatggtaactatctaactctatcattctgtctatcattctatcattgttgattgacattgcactataagaaccaacctacctacctaccttccttccttcctttgttccgtgatgaactcattgattccttttttatttggtggttggtaaaccgctactctcattttattctgatgctcagattttcccagatttgaccactgagaattcattcatattggggcctttgttctttttgacatattcctgtcatttgctgagaatttctggcacagcaagatttccaggcttattttgcactttccctgctgcaagccctggaattggttatttctccaaggaaccccttagtggacttctgtttggtggaagatggtatttagtatccaagatctggtcacccagtattttcattgctactgggatgtcattgcttctaggacctcttagcagacagaactaggaaatatatatacatgtgtgtatatatatatatatgtgcatgtgtatatatgtatatatgcataatacaaacatctgcatatgtgtgtacatatatatatacttccacagctatctgtatgtgttatattttaaatgagtttatttactaatacttctagttctaatccaacatcttaggattcttttagtctcccgactctttccatgctcttaaatcctttctcagactgtgagaaatctgactccaattattttagtaaaaggcaaaagattcattcgttctgaagagaaaccagagcattctaattattttagatatattcaaccatttgctcagtcacctaacatatttgttcagtatgaccactctcctaaccactcagcctgcgttttccatctgctactccattccccctcccactgggctggggcatgctggcatctttgctgggcaatagtctctcccacaccatcctatttccttggatatgaggcatattgctggagatgactgtgcacaaaaccccatcacctttgttgccctgcttctttggaagctgacatctctgtgttgggaggggtagggaagaaaaggaaggttgggaagggaaggaagaatgggaggaaaggtaggaagccacattacagatatatattttgagaacagagctgacagaattttctggtagattgattatggagagtgaggaagagaagtaaataattaagtaataatgatcccaaggtttttggcctgagcaactgggaaaatccaattgtcattaactgagatgaggacaaagcagtaggaggtttggtggggttgatgaggagctcattttggatatgttaggtttgacatgccttttaaacatctaagaggagatgtcatactcactgcacatgcatcttgaagtgtgggttggagatgtatatttggaaatccttggtatatagattttatttaaagccgtgagctcagctgagattaccaaggaagtaagatagatagaaacgtttatgctgagcccagggacaaatttgtgttagggagatgaggaagaaccagcaaggtaggtcaaccactgaggtgggaggaaaactgggtaagtgtgatattctggaagtcaagtgaagaaaatgcttcagttaaaatgaaaggatcaactatgttaatgctgttgataggtcaagtaagatgaggactatgagtttaccattgaatttagcaatatggaagtcactggggacattaataattatgtgtatgtggagcggggagcttgattggagcaggtttagaacgaatgggaggaaagaaatgagagagccagatagagaactctttaaaggagtttcagcctatatataagccgcagtcctctgcttatatgtttcttggctctgcacctgagtagtcttttctgagagtcatgtgagtaaccttttgttattactacgtatacatttttttgctaaatactattttgtcttaggcggtgaaatgttactgtaattggtcaggttaataacagactgacagtgcagttcctacacttgtgcactgaggaaatcatcagagcagtttcagcagcataaaataggtagagagtacaaaggaagacctagttttgaaaaactcttcaaagtgcttaaagttttgaaagtgtcagaggaaataggaacttcatagattctatggtgaggagccttcttgggccttggtcaacaccttaacctttctttacaaaaagttttcagtatagtgtattgaagaatgttttctgtatccacatatttcttgatttgtaatgaaacctcattaggaaattggaatatagttagatttgctgaaatgaatttgatggtttagatgaatgaatcctttattgtctagatagaaaattggttgcacccttaacttaaggcatggataacaaatacgcagtgtgtatatactttccacagccctctcctattgcttatgaaccatgtctactttccacagttgtctcctattacttatgaaccacattaactcttcatgctgaacccagatgtagcatcagaattcttgttagtaatgttccataaagccactaccaattagtcttacatgacatatgacataaaaccttttttgatccctggtgtaagaattcagttcacaagataaaaattatgcagaaaacaacacataaattggaaatgagcattgaattgcttattcacattactggagtttatcaataatagtaatggctaatgagaaaccttaatagaggtgacatagggacacagtgcttgtttctttgtcaaataattgaattgacagttcatttctattcttttcctttgtccaaagattctgctctctttgctgaactcggttatttcacagacactgatgagctgcaattggaagcagcaaatgagacgtatgtaagtatttactaaggttgaataatgtgatatttagtctttaaccctaattattgcaagaaagtttcaggacaacaggttcaggctagtaatttaagttacatacttaatggtaaatagcttctaccattaagtatgaaagttagtagccattttgtaatcagtaaatgtaggacagtagaaattgcattgtattgcaattctaggcccacctttggccctagggatgggtgactttggaaaagtcactaatctgcctacctggtttttacagatactttgctacataagggaattggcaggtgactttggaaaagtcactaacctgcctacttcttggtttttacagattctttgcttttaaaaaggaagttggtaagttctgcttgactaagttagtcctttttaaaagttgtgtattcatgtagaaagctctgaaaagtaggtgtatccttacctttgattggttagaggtctgtgtgaaaactattataacactgagtccccgagaatatcttagattttcttttcttgattagtacatataaaactctttgccctatagaactttgattttgtcttattctttaatggatgaggtgctgtttcacttaagaagtaattcaagtgagcagagtaatttgtcaatcaggttgaatatcacatcattttaggctcttattaacttgagtacaaaatatgtaaagattgcttagtgagtttcagacatttcttaaacaatgatttagcagttgtttttaccattaatcgacagaagagaatgaaggacatgatatattttaaaaaatcagtactagggattttaatggtttcatttactccatgagatactttagaatgtggcccattgattaaactgccttttaatattggctatttgaataagcaactgatactcatatttcataacatctagaatcctaaaagaaaatgtttcttttaaactatgtcaagaaactgtgtgctcaattggaaagattaagggaaatatattcctgattttacaactaacattctattattttatgcaaatcactcaatctttcagttccttagtttttctagtatgacatgaagggattgaatctctgagacccctcatgtcattcttcttccaaacggcaatagaatttcccatgctaaatcactgaagagttagagtatataagtgccagtatgtttcattttgcatgaactgggcctgttaaatttctgatgtgataaaatctttatgctgtagaaggtatttgacttatttggctgaagattgagtcagaagtttcctcaagtagatcatgcccttatttaaaagtgttgctggcactcaggcaagcaacattggtaactttacttagattaagaaagtttaaggattttttggttgctaaaacaaggctgcttaatttttttttttaagacagagtcgcactctgttgcccaggctggagtgcagtggtttgatctcggctcactgcaacctctgcctcccaggttcaagcgattctcatgtctcagcctcctgaatagctgggactacaggtgcatgctatcacgcctggctaatttttgtatttttagtagagacggggtttcactacattggccaggctagtctcaaactcctgagctcaagtggtccacccacctcggcctcccaaagtgctgggattacaggcatgagccaccacacctggctaaggctgcttaattttttgatgtgaagatccaaataagagaaaaaagtgaaggagattgattttttaaaaaatggtttttttatgatttaaatacttttttttcatgtgcactttcacatgttctctttatgtaccttgtactaatatttactcagttatgggcatcataagaaaatagtttcccttctgtgtttctgttacattctcaataaaaatgaaccatatagtagtcattttgaaatgataatattcttctagaaattgttaacaaatggtcgttaccaattactagatacatttttactttttttgcctgaggtgtatttttttatttttatttttattttttttttgagacggagtcttgctctgtcgcccaggctggagtgcagtggcgcaatctcggctcactgtaagctccacctcccgggttcacaccattctcctgcctcagcctcctgagtagctgggactccaggcacccgccaccacgcccggctaattttttgtatttttagtagagatggggtttcaccatgttagccaggatggtctcgatctcctgacctcgtgatccacctgcctcggcttcccaaagtgctgggattacaggcgtgagccactgcacccggccgaggtgtattttattgttgctgtttttgttgttgttgttgttttgttttgtttctttgacagggtctggctctgtctcccaggatggagtgcagtggcatgatcttggctcattgcagcctccatcttttggactcaagcgatcttcccaccccagcctccagaatagctgggaccgtaggtgcacgccactatgcccagctagtgtttgtattttttttcttaggtagagatgggttttgccatgttgcccaggctggtcttgaacccctgggctcaagcaatcctattgttgctgttttatcatttgtgacattaagttaatatttactgccttttgactttattgcattatttatgtattaagtttacttttctttttgtctctgtgactccagacacttaatttaaaatagtactgtttggtactaacttgatctcagacttacatgaggactctgaaattatgtgacacttctttattcatgtatatagtataaggtggttatctggatgacccagaatatgcttatattttggttagaaaaaccacctaaatgaaaagaacttaatgcaggctttaagaagtttgctggaccctgttttagaaaattagttttattttataggattaaaaagtggtgttttttttgattcataaaagttttagaaatttaagaagtatagaactgtagaaaaaaggaaaattactcagtgattcataaaagttttagaaatttaggaagtatagaacagtagaaaaaaaagaaaattactcagtggtaactatcctctttatgattcttgcctgtcttttggatatatctatattctttctattgtatatagagattatattatgaatagcatttactttgtcttgtttttcttaatggcaatgggaaaatgtattttgctggatttcccttaagataaaagacacatttttgactcctgtaatggtcattctcatagaaaataatgaagccaactaaatgttttaaatactgaatcccttacctctttcctagttgttgctgctgtgcttcaagtaactgaattgattttatctctaggctatccaagatgtattctcatacaagactgacttagagtattctttttactaggttggctaatagcagttaaattatttgtgccaaattgtgtctcacagtttgattttaagatgtgtatgttttattcttttaatattcttttgctgatttgaaacctacaggaaaacaattttgataatcttgattttgatttggatttgatgccttgggagtcagacatttgggacatcaacaaccaaatctgtacaggtaattatgtgtttcactggtaaaagttttaaaaagatcaattttattttgtagtttggtcatactcaaaattaggtggggttattgggctattctggtaggttaaaagattcctggtgttatgcattctacttctggtatggcaattatgtaaacaaatttcttgccaaaaatggatatgaggagtttcatagttatgtttcagtagtgtaatgaatgaacagttcatatcagaaatagaaatagtgattttgaattatgaataatgtctctgtataagattaacctgagaaccagacagggcttagggaatcaaagggaagagcctgggttaccagaacctaggaacttggtggaggagtcccatgcatttaatacatgtacttctaagaaggggcagcacctggctgatactaatatctttaagggggcctgatgaggtcggggttgagtatactgaaagaagccagaacctggagcaaattgccagtgctgggatacagctgatggtagaatgaagaaaaatcccttctcctcccttctagctttttctagtatcccctattgacaggacctaaaaggatgccagctgggaataatttatatcaccgattatagaaagtggacttagtgctgagagacagtgaataaataaccagcacattctcctatctaaattcctctctacctctgcactacctattcctcttcattttatgtatttacttatactgtttcatgcctgtttgccttcatagaatgtgggatacacaaagtcagtgttctggttttatcgtttgacaaactaaatcttagttgcttaaagcaacaaccattttattagattgctagaatctatgggtcacgaattttgactgggtgcttacgaattttgaccgggtgctccaaggatggcttgtctctgctccatgatgtccagaccacaactggggagatttgaagattgtagtagcttgacatttgggggctagaatcatcttgaggtttcttcactcatatgtgtggcacctggggtggaatgacttgaagactaggactactaaatggagtgcctgcatagggcctctttgtgtggcgtggtgttctcagtcatggtggtctcagggtagtcagacttcaaaggctccaagtatgagtgttccagcacacaaagcagaggctgcatttccagcttcagaattcacatagcattacttctatcttctcttgattgaaggagtcaagcccacctaaattcttggggaggggaaatcgactctacttcttggtgggaaagtggcaagatcacattgtagaagatcatgagggaagatcatgaaggatggtagatatcgtatggctaattttggaaaacacagtctgccatccccaccctattctatctttgacaccaagggatactgcctgggccatagttgctcagtacatttttataggataaattaatagtttaaaagatatgaacattttttatgagtttgaattgtattgtcaaaaatgctttccaaaatatttcctgtttcttatttttttaaattttttgggaagctataatattttgcatatggtaaaatattcaaaaggtacaaaaatctgtatagtagaaaaatgtctcctgcttttattcctcagccaacaagttctattttccagagacaaccactgttaccagtttcttctgtttacccttccagagaattagtgcagatgcaagtgtacacatatatatacacacacacacagacatacatatataccccctccccacatatatatataatttgtaacacaagtggaaacatactagatatattgttttctgcatctttcattttcactcgttatattttggtgaccttagcttccatatctgattgaattttaaaagtagattttaccttctttcttgttcattttattataagtttttattgtccagtgggtaaaacctttcctccatgttttccagttaaagatattaaggcagaacctcagccactttctccagcctcctcaagttattcagtctcgtctcctcggtcagtggactcttattcttcaactcagcatgttcctgtgagtagccagtcttttacaatgattttggttataatatgctatctggaaaatatgtatatggaggaggcagttaacatttattgaatactactatgagttatattgtctcatttattgagggaactgagactcaagaaagagccttgtgggagctagaaagttgttagtgcctttggttttgctctcttttcccctctgttcatgcctccataatttcattgtttcatttgtttcattgcattttaacagtatccagtatttgtttattggcttactgtcctttctcccaccctttctttctcctccctattaggatatacattctttatatatggacatagaagaatgtaagatggtcagtttttatatctctttagtcacagcatctagaatgattgccttagtttgggaatgcctagtgctaccttttgaaggggctcacgtttttatagaagtctggtagctcttttaagaacacttctgctctgtgtccagacaaaagccctgaggccaggaaaaggaagtacctgatttaggtactttttagaatggggaaagggaaagtataagaataaaaaaatcaaataatattttagtatattatatgtgctataaattgtggtatctttgttcctgcaggctctacatttagttactaaatcctggtggttatatgcacatattaattcaaggatttatcttttctgcccctgccaggccatcactatctcacctggattaagtcaataggattttaactggtcagccttacaactcctcaaacctttcttagcagtggaatcttcaaagagaaatctttcagtgtcacaagctttactgtatcagtcatttgcttaaaactttttagtaacttcccagtccttacaaggatgaaatttaaattcccagagtactaggctttccatgatctggcccccatttacttttccagtctcttttcttgctatcccctcctacttccacattccccttaatttgagccctgtgagagttcctctctgagagctcctatgcactctactcattcaaccgctgtgccaggcactgttccagatgctggcagtgaacaacagcagtgagattgctgctgttacagttctaggtttttgcacatcctctttcttctgcctagaatagccccatttttttcttgtcttggaaaactcatccttcaagtcccagttcaaaaactacttcctttatgaagcttttctctgattgctgctattggtagctctctgaggtcccacaatttctccaaatgatttaattttttaaaaaattaataattacaaaaggtagcatactgtataccctgtcctgtaccttgtttttttagcttagcaggataactcttaatttcagagtatataattttcccattatgctacataatgtttcattgcatggccttatcatgcttaatttagtgatttccttattgatgagtatttgtgttgtttttagtcttttccagacccaattaacctgtacataagtcttttccagactcaaataacctatagtaaataacctggtacataagtcactttatatttttaccaggatatttttgggatatatttcaagaggtgggattgttgacaccaaggtaaatacacttgaattttgctagatactgccaaatttctctctataggggttgtaaaattttacatcctcatcagcagtatgtaagagggcctgttttcccatcatcactccacaataggttttgttttatatctcttttattataagtatggttaaataatatctattcatatgttttatatgtttaaggcctatttgcatttctttttaaaaaatgaactgtcatttcaaatttttgttctttttttttttttggagatgaactctctctcttgtctaccaggctggggtgcaatggcatgatctcggctcactgcaacctccgcctcctggcttcaagcaattctcctgcctcctcagcctcccgagtacctgggattacagggattacaggcacctgccaccacacccggctaatttttgtatttttagtagagacagggtttcaccatgttggccaggctggtctcgaacttctgacctcaggttatccacctgcctcggccccccaaagtgcttgggattacaggtgtgagacactgcgcccggccgttcattttttaattgaattgtattggtctttttctctttaatattttaggtgctttattatatattaggattattagtccttagtttgtgaaataagctgcaaatattttttccccaatttttcttttgtctctttgctttatttctggtgtttatttttccccaggtgtactgttttctatagccaaattattgatcttttctttaattgcttttttgttcactcaaaggaaggttttcaccactgagaggttataaaataattcactcatatttttactctttttttttgcttatgttaattttttgtttggaacaatctcaaattcacagaagtgttgtgagtaccttgcaaataacttgttttttccttatgcatttcagagtaagttaccagtccgatgcccctatcactccaatactttagtgtctacttcctacaagcacagatatttcttagccataatacaagcacaaaatcgggaaataaacattaatatgttactataatctaaccttcagctctcgtttaaattgtgccagacatcccagaggtgtcctttagactatcaaaaggacccagttcagaatcaagcattgcatgtggttatcttgtctttttaatcttgttcagtatgaaacagttcttcattaatccttgactttcttcaccttgtcacttttggggattaggagttagttattttgaagagcatttcttagtcgggtttgtctgatgtttctttaggatcatattcaggttttatatctgtggcaggaatgtcacagaagtgctgtctgtgtccaacttttgatgacccaattttgattttttctaatactgattattttcactttgatcccttcatagatgttatctgccaacctattccattgtgaagttgctttttctctctatgccatacatattttgtgagaaagatactttaagactatgtaaaaatatcctgttcatcatcacactttatatttgttcacttatttgttaatatctgtatggattcatcgtttcttattttattcaacagattataatccgttactataattatttattctgattcttacattgttctggatttggccagtgggggtcccttcacaccagctcttatgttcttttaacatgtctcctttgggctctgatgtccttacactaggctgtcttcccatgcggatgccctcctcactctgctgtgactcctcatgccaggccgcctgccatatcagtgccctctctacccttcttggaccctgacattccaccaggctacttctctgcgtggatggtggtcttgctttaccccatctagtggcttaggataaaattattcaggaaggaatattttctaagtgactatgaataagtatttatcatgagatattatttttagtgtttagatctcggatccatttgaaattacccttgtgtattatatgagatacaaatccaattttatgtttttccaaatgactatcaaaatgattattctagtaccatttatcaaaaagttcatctgatttcaattatatgcatgtattttaaatttatgtaaatggcattatagtagatatctttatattatttacttttaaaaatcagcacagtgtttttaagataaattcctattgctctgtgtacatcaaatctgttgcatctaactctgtacaacattcaagtatgcattcactacatttttacctacaccataatgaatattttaaaaaatgttcccttgcggacccatgtgagaaatcctttagaatatatgcctagaattgctgggtagtagaatgtgcaggtatttaatttgacaagtgcttccatatttctctccaggatcatcatagtactctgtgggctggcagcagtgcctgaggatccctgtgacttctctcctgatacttggcattgtctgcctttttaatttttactccatggcacaatgtgtttttttgttgtttgcttttattttgttttactttgtatttctttggttattgttttcaacatttatttacattcttatgagctttttggactttttttcttttatacattgtttattcctgtcctttgccagtttttctactcagttgttgtcttcttgtttatcagcaggaattcctcatatacttgaaatagtaaaactcttgttggatttagacattcaaattgcctatatcttttccctttctattatctattaactttgtagtctttattaagtataaatagttaattttcaattactcaggcttatctttttttttcttttcctttatggcttatttaagaagtccttctatgcttttagagcacagaggtattctgcattttcttttattaaccatatggtttacctttcacatttaggtttcttaatactcttagacaccactttaatatgtggtattatgtagggatctagcactaggtagggatctaattttaattttctctataaaatgaatcagttttcctaactgtattgtctttataatcacttgtaatcactcttttcaacaatattgtatatctctctgtttactgaaatcttttatgccttagttcagttgtgtagttttcttcatatgggtcctgcacattccttagaaaatttctaggtattttgtaattgttattgctattgtgagtgaaatatttatttatttgttttatttaaatcttttttatttttaactttttttgggtacatggtaggcatatatatttgtggggtacatgagatgttttgacacaggcatgcaatgtaaaataattagatcatggaaaatggggtatccatcccctcaagcatttatcctttgtgttataaacaatccagttacatactttttgttattttaaaatgtacaactaagctcttattgagtatagtcaccctgctgtgctattaaataatatgtcttattccttctccttttttttttttttttttttttttttacccattaacaatccccatctcactaccagcttctcagtaccctccccagcctctggtaaccatccttctaccctatgttcatgatttcaattgttttggttttttgatcccacaaataagtgagaacatgtgatgtttgtctttctgtgcctggcttgaaatatttattttttattatgttttctaagtgtatattaatacaatattttcaagtcaaatttttttttcagtggattgttacatgtgcttcaagtatatagcatattaccttgctaaaaggcacgctgtctcttttgttttaatgttttttaaatttcttcttttagtgtaattatactagaattacagaaaaagcaggtatctattttttatcctgactttaattgtaatgcattcagcattggacttggctgtataattactgatagctttttaatgttaagaaagtattcctcggatccttgttttctaggattttattgaggaatacttgtcgaatattatcaaataccttttaagcatcaaaggccgtgaagataatagtctcctcccgtgttaccttgtactctttggtttcttggaaatgtattttaatacactctacatattgctcagcttacatgctgagtaggtgttaaggatgaaggaagatgcaattgtcacttgtcactctcaccagtgagactgagagcatttctttctcccatatcctctcaaggtcatttaaatttttttttatgataaaaaaagtttaaatttgcctttgactaccatttgcgtttccttttcagtgaaatggctgttcctgccttttgtctatttttcgcaaatattttctaccaatatatatcttttaactttgtttatggtctagtttttattgttaaatagtttacttattatttgttcaaatctatttcttcttcctttgtggcttctgtgtgttctgacttaagagggtctgcaacaccctgagagtaaacaagtattctcttaaattttatttttatattataatcttatagattattttgaagatgttatgaagtagagattatgtctattgcgtgatcatgcatgccatcttttctgtctgaattgaattgctacttctatgttgtttctttattctaacaaaatgagatagattcactgaatattaaaagactttgggaaaatgcgaatgttatctttatgtatctcaatcattatgaattcacctactaaattaaagaaaatagcactgttggctgggtggggtggttcacgcctgtaatcccagcacgttgggaggctgaggtgggtggaccatatgaggtcaggagttttagagcagcccagccaacatggtgaaaccccctctctaccagaaatacaaaaacttagcaaggcgtggtggcacacatctgtggttgtagctactcgggaggctaaggcaggagaattgcttgaactggggaggcagaggttgcagtgagctgagattgcgtcactgcactccagcttgggcaacagagtgagactctgtctcaacaacaacaacaacaacaacaacaacaacaacaacaaagcactgctccattcatgcatctttcttttacaacatttggaacaaaggcagtattacaaaatagaaaacagaaaagaatacaaataaaattattttgcttttgatattcttttaagaccaaataagagagattatggagaaaggatattggcattttaactgcaaccttatactgatactgaatgtttgtatgactacgaaccaagttttatatgtgtgtgtgtgtgtgtgtgtctctgtgtgtgtgtgtgtgtctctgtgtgtgtgtgtgtgtgtgtgtgtgtagtttgtaggaagaaatgtagcaacagatcaatgattcatatctttaacaggatggcatagacttactctgcattttgagttatttttcctttggtatagatggatcatgctgatagtcacttattacttaatatatatatacagtttctaatatacctttcctttgaagttaccctgaagtgtttttctgtttatatgtgggtctcctccttttctatgcaatttgctgcttaaggattatactcattaatttttgtttttattatgctacaggaggagttggatttgtcttctagttctcagatgtctcccctttccttatatggtgaaaactctaatagtctctcttcagcggagccactgaaggaagataagcctgtcactggtcctaggaacaagactggtattactctatctcctaacttctgttatttctatttcagattgagcttaggttccatttcttaaaagaaaatgctggattaaatttatgtttattaggctggcttgctgttttttaattggtggacctatattgtttgttgtgagtgattaccgtggagaggaaaggggagaaataatctttggttgtctctgtctttacaggtgaaagatactttaaaatagactcagaccccaccatcttcaggagagatttcaaagtttcagttaaagataactgaatggagctatgacatttgttacctcattaatctctgggtgttatcccgtgattttagcaattctcctttaccagttagtgtgtcccattcccaaaactgcagcttggttagaaaaggaggtaacagtttaagtacttttcttcagttcattcaggtatatgtactgtagctatgcttaaactccagttaaagattgttaatcgaagttaagataatgtgtagagaaaggtgtgtgatagaatctgttttttagggcttgcgtaattgctttcacattgacttgtggtttgtctggtttttctccagaaaatggactgactccaaagaaaaaaattcaggtgaattcaaaaccttcaattcagcccaagcctttattgcttccagcagcacccaagactcaaacaaactccagtgttccagcaaaaaccatcattattcagacagtaccaacgcttatgccattggcaaagcagcaaccaattatcagtttacaacctgcacccactaaaggtacctgagcagaatttaaggctgtgtaaatttatttggagggcagtaagggttgtgtcatatgatttgttttaattcaggttataatttctgagcacgtgctgtttgtcaggaatgtctttggttatgaggacgttgcagagatgactaatgtgtggttcctgtcataacaagggatatagctctccagaccagttacatctgatggttattttgaaaatctgggacactttcttggtgccattttattctggtggataaaatacaggaacacaaattttaagctagttgaaggcagagttcaggtcagccagatttttgtggctgtgaactttttttgttttgaaggaatatttaaaataatagggtccatttcaggtgtgttatagcaatagaatcacacccttaatctctgaggaggctgcatggtttagtaaacagtatattgacctggtcatgaggagacctgaactctgctttcaactagctaagaatttgtgtgtttcgtattttatccaccagatggcctcatacacttgtgattctatgagaggtttatgtcattattgaaagaagttcaagtctgaggatttggtactattcagatatgggagtcatttccgtatggagatctcttaggtagattagtcatcattgtactcatactgatatctgtatacactgggtacaagaaaacttttgcagcattcttatctctggatttagtttgttggcaccagatatgactaggcgataatggggtatgggttgtaaataaacaccaatgttacatttgtactgtatctccaattgtgaataggtagctcgttttttggagcatagttttaatgagggtaaatttgataaatttaatttccagatactcttttagctttgttctattacatggtcatagacaatatgacattgataaaaagaagacctagatgagagaatggatgaatcagtgaaaattcatccatcagtcccaccaaaaataaacagacaaacaaacaaacaaaaaccagtttgaaatgcctgctctctcagtacaaagtcagaactgctgccttttccatctgaaaagtagcattcctatagaataggtattcttgtgatttataaatgtgtattaagggttcatgaactccttgaaacaaaatgcaggatttaatgtatgttcatatgtggattattctagggatagtctccaaaactttcattaggatctcataaggatctgtgccttcccaaaggctaagaatttaaactaatgaagaacctcattgtagttcccataagctattaaaatacgtctatacaaaaagtctgacattaatatgactagcgtataaagcaggggtattcctaagaatttgcccttagcagatcattgactatgtttgagtgatggaagatcttacctataataagaagacaaactgttcttttctgagcagtttatcagttccagaaacctgaattacacattatttgaaacttcaatactttcctgtcatctgaagactatagttatttttttgtgagcatgtgctaatatgaggaactgcaccttgcctgttttttttcttttatttgagacagagtctcgctgtgttgccaggctggagtgcagtggtgtgatcttggctcactgcaacttccacctcctgggttcaagtgattctcctgcttcagcctccagagtagctgggactacaggcacgtgccaccatgcccagctaatttttatatttttagtagagacagggtttcaccatgtcggccaggatggtcttgatctcttgacctcgtaatcgcctgcctcggcctcccaaagtgctgggattacaggtgtgagccaccgcgcctggtgccttgtctgtttttatagtacaatctaaataggtggtattattataataacatacagatttaaagtatgtttttcatttatttgagaatggggaggaagaagggaagtatgggcaagacattatacagttaatcatgttaatactagtagtaaatatgttaccattgaaaaagaagaggtaatttccacaggtttaagactgagattctctagcttggaatgtaaaactcttcacaatttggctctagtttagttttttgtttttttgttattgttgtttgtttgtttttaatagagacaggatctcactatattgctcagtctggtctcgaattcttgggctcaagggatctacccaccttgatctcccaaagctctgggattaaggcgtgagccaccatgcctggcctcctagtttagttttcgaactttataatattactcttttctataaatcccttcttctagctcaactaatctgtcattgtcctttgaattctcttgtttttcctagttttttggctcaccattttctaccaaccagcaacaacttatgcctacttctacttctcagtcctccatgtcctttaagactgttttgagtagtgtagatgagagataatgaaagcctggaatatcaatgaaagtggagaaccaggatgaagagtagagatgttaaaagtgtagaatcttagagattggtaattggattgtgtagaaggaggctgaacgatagagaggaaggtgtctaggatgacttccgtttttctatcttggggctttttgggtagatgatggcgaaaattattgaaatgggagacagaggtaaaatatgttgcccagatcactctgctaataagaagtggagccagaacttgagcccaggtggtctggctcggagtctatgtgaataatcactatactgtatcgccttaaaaaaaaaatgacagatgtattccttgctctcaagaattctacactttaattgggggattaaattcacataaacagttaaataacagtcactgtgataactaataaattaataactcatgcagtgcccttatggaagctattattatatagaaaaggagattaataataataataattgcatttaagttcttactatgtgccagacactcttctaagtgcttaagtgcattatcttatttcaaataatatttacacattatttgaaacttcagtatgtttctatgatttatggtgatgggttgtgatatctccattttttagatgagaacgctaagtacagattatttgccctaagtcacacaccgatgctgtttcagacaaagtaggcattcaataaatgtttgatacatagtttaaaatctttgaagaaagtttaaaagaaagaactatcaaaatcagtgagttacacatagtcaaaaaaatatatggcattgaatccagccatgttccgttaagggggatttgcatgtaatgccagagaggattttgagcatgctaaaatggataaacagcctttggaatgtcctttttaactgtttccacactaggaacagtagtaactatgttcagctgctatttaaggccccaaacaattctttgcattgtagtttgtggcctggtcagcatttaccaagtcaccatgagagttttttgttctttcacttgaacatattgtcatagaaatttagttgtttcccctcattctgtgttgaacccaaacatgcctagaatatttagagtatccctgatttagctgctgggtaatttgaggatagttgggtactctgggatgaaaaggcttgatacaatatgggaaaaaaaggaagcagcagtggcttggtaggactcaagccacatttggccttgccttggtattcttccatctcctttgtgtgatgcggtcgtctcagcaaggagacagtggtaattacacaattggtagtacagatttggattatttttcttaattagtttaagaaatattacaaagccctctgtacatgttatctgctagggctttaaatctgtaactgtagctagaaataggattctttcttataagttgcctaattcattatatttacacctcttctgttctttaaaatagtcccaaagttccctgaacagtgtttaattttggggagggatcttttaatcataattttaaactcagaggatgtagaacatggcttcctataatactcttctcaaagtattggtttaagtcagtggttctcagtctgtatattgtggaccctgggatgtgggtgatgggggtagtagctttatggcattttgcaaagcatctgcaaatccatacttgaagcaagcattttctgtagaccaaataatttatttcatatatctttgtacagctcttcaaatttttatagctatacttctgactaataaactccaagttcattttaaatcttcactaaattcttagcagcctttttccatcatgtattttctcagtacacagaagctgaaaggacaaccttgatggttttgggtgaccaggatattattttatattaaaagagagcccttatattcaggagcctttggggagagactatgggttttctaggtgtagaattatatcatctgtgtgagagatggtttgacttcctctcttcatatttggatgccttttatttctttcttttgcctgattgctctggctatgacttgagcacttgggaattcttgttttttggttttttttttcacattatgataaatatatattttcatagtgccagatttactgtaatttcttattgttattaaaacctaacacttggtcatatgctatttactttatgtgtttctaatttttatttgcgtatttggcctaagcatgtttatatctgcttctgagtaatttctgcattttatatgtttttacttcataaaagatggaggccacctcaaaacaaattaggcatcaaaggaacatacctcaaaataataagaaccatctatagcaagtccacagccaacattgtaatgagtgggcaagagctggaagtacattccctttgagaaccagaacaagacaaggatgtccctctcaccactcatattcaacatagtgctggaagttgtagccatagcagtcaggcaagagaaagaaataaaaggcatccaaataggaagagaggaagtcaaactacctctcttcacagacgatatgattctatacctggaaaacccatagtctcagcccaagactcctagatctgataaacaacttcagcaaagttttaggatacaaaatcaatgtacaaaagtcagcagcatttctataccccagtaatgtccaagctgagagccaaatcaagaatgcagtctcattcacgatagccaaaaaaagaatataaagtacctgggaatacagcaagctggggaggtgaaagatctctacaatgagttacaaaacactgctgaaagaaatcagagatcacacaaacaaatggaaaaacattccatgctcatggataggaagaatcgatagtgttaaaatggccatactgctcaaagcaatttacagatttaatgctattcctatcaaactatcaatgacatttttcacacaattaggaaaaactattctaaagttcacatggaactgaaaaagagcctaaatagccaaagcagccctaagcaaaaagaacaaagccagaggcatcaagctacctgatttcaaactgtactacaagactacagtaaccaaaacagcatgatactggtataaaaacaggcacatagaccgatggattagattagagaacccagaaataaagctgcacccctgcaaccatctggtctttaacaaaaacaaacagtggggaaaggactgcctattcaataaatggtggtaagataactggctagccatatgcagaagattgaaactggatcctttcctttcagtgtatacaaaacccaactcaagatggatgaaagacttaaatgtacaggctcaaattataaaaaccctagaagaaaacctaggaaatatggttctggacataggccttgtcaaagatttcatgatgaagactccaaaagcaatcgcaacaaaaacaaaaattgacaaatgggatctaattaaactaaagaggctgggcgtggtggttcacacctgtaatcccagcactttgggaggctgaggggtgcatcacttgagatcaggaattcaagaccaacctggccaatatggtgaaaccccatctctactaaaaatacataaattagccaggcatggtggtacatgcttgtaatcccagttacttgggaggctgaggcaggagaattgcttgaacccaggaggcggcaggtgcagtgagctgagattgtgccactgcactccagcctgggtgacagagctcaaaaatcaataaataaaaatcaactaaagagcttctgcacagcaaaagaaactatcaacagaggaataggacagcctacagaatgggagagaatatttgcaaacagtgtatccaacaaaggtctaatctccagaatctacaagaaacttaacaagcaaaaaacaaccccattaagaagtgggcaaaggatatgaacagacactttcaaaagaagacatagacatggccaataagcatatgaaaaaatgctcaacatcactaatcattagagaaatgtaaatcaaaacaacagtgagataccatctcacatcagtcagaatggctactatcaaaaagttgaaaaatatccgatgctggcaagattgcagagaaaagtgaatgcatatacattgctggtgggaatgtaaattggttcagccactgaacgtagtttgtagatttctcaaataacttaaagtagaactaccatttgacccagcagtcccattactgggtatatacccaagggaatataaagacacacgcacacatatgttcatcacagaactattcacaatagcaaagacatggaatcaacctagatgcccatcagtggtgaactggataaagaaaatgtggtacatatacaccattcaatactacacagccataaaaaagaatgaaatcatgttctttgcagcaacatggatggagctgaaggccattatcctaagataattaatgcaggaacagaaaaccaaatacttcatgttctgtcttataagtgggagttatacattgagtacacatagacataaaaaggggacaatagacaacaggggctacttttgagggtggaggatgcaaggagggtgagaatctaaaaattacctgttgggtactgtgctcattacctgagtgatgaaataatctgtatgccaaacacctgtgacatgcaatttatccatgtaacaaacctgcctgtctaccccctgaacctaaaataaaagttgggggaaagaaaaactgaatccaagggaaaacgagaaggtaaaaatgtttaatgatcatttatgccgaagtattaatacattgtatctactccaaatccatgaaattatttttagatcttcttatctgggataaaatgctgtttattgaaattctgctactttcagtgtgttttttgaggccatctgaaacaagggctttgcttttataagttatcttttttagccaagacagatgttcttgacaaacaggtgttctgaagctttattttgatttttagttttccccgatcctttgaaatattgagctgagttttacatgggtcaacctgtctgaaagcataatgctttttttttcttaaacaaattataaatttacatgatattttagttgccagttattttagtaccttcattttgttagataggctcaagcagctgtggatgttaggcaaggctttcagcaccttataaaaatctgccagatctgaaaggaaacacttagcaggcaagtaaaatttttaatagattagtgttatgagttgtataagtctttaggttaatggtacaggtttagtaccccttaaatgaaatgcttggaaccagaagtgtttcagattttgggtacttttggattttagaatatttgcatatacataatgagatatcttggggacagaacccaagtctaacatgaaattcatttatgtttcatgtatatctcatacacatagcctgaaggtaattttatataatattttaaataattctctgcatgaaaccaagtttgcatacagtgaaccatcagaaagcacagttgtcactatctcctgtggacaatctgtagttgtttggcaccaccatcattcctggctctgaattcatatgctactgacaagcaatcattttcttacacttattcacaaattcacacctaagaacttaacaaaaattatgacataccattaatacagtgaaaaaataatgtgtgcagagtaacaaggcaggacagtagaatcaccagaataccagtgtcagctactacacaacagcaacaacaaaaaatggcagctttcagtctctgcctttgatgctgttttcattaaaagcctactgtaccctctattttatgtcttcaggtgagaagaaacatcagaagcagttgagagactggaagtgggtcctctagggatgaggaggcattctgctggatgacttctaaaaatgttttctatggagtcatctgcctcattaacaagtttttgttttagaagtctctttttgattttgtaaactgacatgatttctttttctgttatgactgtatgctgctttagtccttcactaggcccatcacacatttttaccatgtcatctataggcactttttctgcagcgttaacagcatcatcttcattgtcattattatagattgagtatcccttatccaaaatacttaggaccagaagtgtggagttttccacttgtgaagttgtgtcagcactcaaaaagttttggattttggagcattttggattttgggtttttggattaaggatgttcaacctctaataattctcgtcagattagcataaatttaaaataatgatacctctgaatactcagaaaagaattgaaggccatttttgggggaagagggaaagggctggtatcatctacagactattttgaatcacagatttatgtttaccgtgattgttagctaagatttaatctcaaatggttttaagttttttggtatttgtagtctttttttttttttttttttttttgtcctttttagggatctgcctgcctcagcctcctgagtagctaagactcgaggcacataccaccatacctggctaatttttaaatttttttttgtagagacaggctatcactatgttgccttggctggtctcaaactgctggcctcccaaagcactgggattacaggtgtaagccacagtgcatggcctgtagctccttcttcttctaatattgagttactaagtttatgttcagatatttttggtattgtatgcatttgtaaatcctattaatttagaatacatgactctccatattcagtgtaaaagatttgttatttataataagacaaatccttttagcactaataaatttcagaggttaattcttagaaatctagggattacagcaaatttgatagctgtttagttgagaaagataaataagaaagtatattaaagtatattgttaatgataactcaaagagatgaatttagttggtcacattaaaaacataacaaagtcaccataagcgtgtgctgctattgatccaatgttttaattgatggtgtccaatcccttggtgttgatcttacccattacgtctgcagaaaagacctaattataagctgcttcccctgccacagtagttgtgtaccctttgattccttttcttttttctaacgcaggccagacggttttgctgtctcagcctactgtggtacaacttcaagcacctggagttctgccctctgctcagccagtccttgctgttgctgggggagtcacacagctccctaatcacgtggtgaatgtggtaccagccccttcagcgaatagcccagtgaatggaaaactttccgtgactaaacctgtcctacaaagtaccatgagaaatgtcggttcagatgtaagttttgaaacttagtgcttctcttaatgcctgatttaaaaaccaacaaaaaaacaccttttgcttttgttgccttgtttttgttttttttagagtttcttatattgcatcaaataaaagagtgtgctgaattgcacatctagtctttggaggaaaattagggtaaggcttactacgttagaatctaagtgaaaaggtttttgaaagtgaagtggtttgatgaaaagcaaagtatgcatacctccctcttctttactccttctttagaaccaaccctcttattattctcttcaagcccttacaccctcaacccagtcatccactaatattttacagattcaacgtttcctgattgaaatgttttagcgatcttcagataagagtctatagattactttttaggtaggttttatatttagctttcttccttgccgttttgaagtattttcaccacttcataatgatgactagctactcttaggaattctgtctcttagtgattatttggtactttcccatttttgcaaacctttaaattttctagcatgttgtagggatttcttataatttataaatcacatagtttcctaagacctgtcactctctaaagccagttactgcacttgccaactaactcttgctttctttcaaaatgattggaaataacttatgtattaaattgaacatcttggtcctaaaatttaatgaatgttaaagctatatagtcaaacagtggattctctaaagttacgattgggaaagcaaagtgtgtatgttttctttaaaataaaaatggatactactagttgttaatattactacttcatcctttctttaggtagaatgcatttgaaaagtaattttaaaatcctgtgggttatgcaaggttgtttatcagactactgtctgatctgtctgccagaatttattaaccagcatgtcagtgacccatttaattataaaattgctccacagttgcataaacagtaatctcagccagcaatattgtaaaaattcataacaaaggaatattgtctggtgaaagtagaacatccagtttctagaataagagtcccatcgtttgtataggtattgaaaacaatgcatgtcaagacatggaataggaaaattagtgttgctatgagactagagaccatggacagtacaggattaggcttgactgttatgttggtttgttttgaggactagaagaggtaagcacaatgcttatggcataataggctctaatacatagcgtgtgtttcagttgaagatgaaacaatgttgctgggatgggaaggtggtgagcacaggatagaggcaactggattggcaaaatgttgataatgatggaagctgggtgtttatttttctatccttttggtgcatggaaaaatttctacaatatgttaaaaaaatgacaataacaaaaatccaaaagctttctgtgatattttcaattaaaaagttgtgtgaccaataagaaaagagtatgattttcatgggagaccaaccaggttaagaatgatgaaaaaggatttttaaaaataatgctttgaaatttctttttttttgttttattatactttaagttttaggatacatgtgcacaatgtgcaggttagttacatatgtatacatgtgacatgctggtgcgctgcacccactaactcgtcatctagcattaggtatgtctcccagtgctatccctcccccctccccccaccccacaacagtccccagagtgtgatgttccccttcctgtgtccatgtgttctcattgttcaattcccacctatgagtgagaatatgcagtgtttggttttttgttcttgcgatagtttactgagaatgatgatttccttttaatactcttttaaattatgaacttgaatgtttcttatataatacccccaaatgaaacttataatagaaaatatccaaagttgcctttatgtaatatgttaggacatttaaaatatttttatgaaatattttagacatgaaaaaaagataaagactaattagaactttaaaaatacataggtcaacagtatatcactgttgttaaaaaatattaacaatattaatctaagtcatcccaaacatggaaaagtccagaaaagcatagctaggatggggagagtatctagaaaccatggggtagaggagtgggttaaaggttggaatgattcagtaaactgaagaagagaggatggaaagtagacctgggagccatcttccaggaaaggaaggttgttatgtggaaaatagaattgttctgcttgttccagaagagttatctggaacaggtgcaggaaaaatatagaaaggtttcttctaaacataaggttttttgatacaatcattgtatttaaaaaccagaagagcaacccccctgcctttttttttttctacttttaggcttactatctgaataatgagcatcttaatgttgacaatcatcactgtatgccattgacccattttataatctctaaacatattccaattaattatatgttggtctattagtcagacatcctttattagttctctggtgtgaaagactgtgtctgttcagcttttgtactcttaagggggatctgtaaatttaaagtatttttaatgaaatattttagacatgaaaaaagataaagactaattagaagttaaaaaatatataggtcaagagtatgtcactgctaaaaatatgagaaaatgtagaaccaataaatactgctagaaacaaaagctaatacttattggttctatgttttctcatctcacacatcccccagttcttcaacgttaattgagactttgtcagcaaagtctcaatgtatgaatgtctacatttattgtatgaatgtatattcagatgaggttaatttttttaacaatgatataccgttgacctacatatttttaaagttctaattagtctttatcttttttcatgtctaaaatatttcattaaaaatactttaaatttacagagcccccttaagagtacaaaagccaaacagacacagtctttttgaagtttagaattgacaggattataaagaaagattcaaacactttatgtttaatgcaaagagacctaaggacaattagaataattttctagtcaacctgcattgaggtttttgtgcttatttttacttggccagcacatcgagacgtgagccaagcctttcaatatgagtttttttggtagaaattttgactgaatgtttatttcaagtaaagaagcattagtctgtcctagcagcaggccaacccactcaggaacccaaagtaaatctgttccagaaggagttgcagagaagaactttgatcagcttgtatagccttctgtgttagtaacttggttgacctcagtattacatgtgtctgttaaaacacaagtcctattaaattaggataaattaatataaattcctaatttaaaatgatcaaaaaaatattttttatcatataccttttgtgcctttaaaccaaaagtatggtgaaagaattgtaatccaccaaaaaaaaaaaaatcatatcagtttttttgtggctttgtaatgctgacatggcttctttttctaccttttttagttcttttgtttggctggtttcactctccagaggcctgctacagccataagtagcgtttttagcataccatattctgcaaactgcattaaatgccacattttctgttatgaaacagtttgcctggttcaaattatatcttactcttcctgtcttttgctggtaaatctgttttgtttaactcttggagacctcacctaagttttcaagaaatatggtttgtttttggctgtgatcctgatggaaaaaatgaacatgatctctcatttcagtgtagaagttctctgtgcagtttcttagtaaatggcaatcttggaactacaaagttgactttataggacagcatgcttatctttctttaaagggctatttagtgttgccacacatcaaaccaagggcttaaaaacaagcagtctgtttaaatctgcattacactcactacttccacctacccatcataatcgcataaactttatgaaacattactgcccttgttttaaggttataggaattacattgttttagttattggaacaaaagaccagaaaaacaagtggtaaaattctacatcttccacagtgggccacattggagcaaatactcttagtggaaatcagtaggtgggaataatggaaagaaaagtatccagaactgatatagaactataaataacctcagatgtgaggttgatgaagggatacaaactactgttaggagtctccttccttccggctcagtcaccccactgaatatcttccaaactctgtatcaccttttaccctgtttctaaatcctatagttaggaaacttgatcccttccatcccaaaatgacttccctttgggagtccctgtcttgggttcctagagtcatcatgagaaggtaggtgctggggggaatcctttgctactggtttgcaggtattagaaatggtgcgaaggggattctcctgtcataccaaattagaactttgtatttcctttctctagaattggtgtacagttaatttagggatttcaggtatttttagtattgttctatgggagtgatgtgacatgggcctagatggatgccctgcacacagtgttcctctcttgcagtggaggaacatgagcttggagaatctaccatgtgtatagcaagcagaaagcaagcctcctcattgtctagagggagattttatctcatccttcaaggttgcttgttggaaactgaaccttgagaatggcctgggaaaagagtggtccggaccttgcattctttgcatacccaataagacgtgtaggagcaaaactcataagagactccctggaggtgtgtttctcaagaaaaatatgtctataataatctatttgcaatgcatagcaactcagaaaaacagagactgcctatgttctatttcagaaaaaaagcaaaacttcaatagacgttgaagttgcttatctgtaacatccaagaataggacgctggttaggtcaaaatgtgagctgaatctccttaaattatgtggctagcttagatctcagaagataaataatgaataggcacttcttaataacttctaacaacaaacaagttgagatcatgatatttctttaggctgcaaagtagaggaatctatcagaacaaatccaataggaaggatttggagagctggagttatccagggtttagtaaaaaaattacttctgtgctgactgcattgtggctttgctgctaccagggactctgcaaataaaagaaaatatgctttgtttaaatatttgcagtatctctttaaatgtaggtttggagcttctaaaaatttatcttgaatagcagttcagtttcatttgaggttacagtagctttggaaggggaagtgaacagcttttttttgttgttgtttatttttccttcctgatgcattgcattaggataaatttatgttgtggcaacctcagcattctttattctgtactttttgtactttttagtttgtcatcttttttttttttttttttttttttttttttttgagacaaagtcttgctctgttgcccaggctggagtacaatggcacgctcttggctcactgcaacctccaccttccaggttcaagcgattctcctgcctcagcctcctgagtagctgggactacagctatgtgccaccacacccagctaatttttgtatttttagtagagatggggtttcaccagtttggccaggctgttctcaaactcctggcctcaagtgatccacctgcctcggcctcccaaagtgctgggattataggcatgagccactgcgcccagcagtttggcatctttataagaataataaataattatttttaaggattctgatttttatcttaataaacaatgaaatacttctctctcctttctctaatttcccttctcaaaaccttgtggggactcattctagggagacagtccttttataccccagagactttcttgcaaatcagtttccttgtctggtagtcattcttactagttttgtgtgcattcttctggagacagttctttaatatgtaagtacttatagttttatttattgacctatttcatagaaaaggtagcatactgtacatgtcatcctgcaacttgcttttctcacttataccttagagatctgttcagatcagtactaaaaacttttctcattccttttttaaatttttatttatttatttatttttttaaagacagtctgttgctctgttgcctaggctggtgtgcagtggcatgatcatagctcactattgccttaaatatctgggcttaagcaatcctcctgcctcaggctcctgagtagctagatgtgtgccacctggctaaattttgatttttttttttgtttttgtagagatgggggtcttgttgtattgcacagggtggtcttgagctcctggcctcaaatgatcctcctgcagtggcctcccaaagtgctgagattacaggcataagccaccatgcctggtctttttcttattcttttaatagctgcattttaatggctacatagtaacctacttcataggggtgccataattattgtaaaattttgcagtccttttcattataaacatttcttcattgaataacttggtacttatttcattttgttcatatacaaatatatctatgggagaaattttattttatttttattatactttaagttctagggtacatgtgcacaacgtgcaggtttgttacatatgtatatatgtgccatgttggtgtgttgcacccattaactcgtgatttacattaggtatatctcctaatgctatccctcccacctcccccaaccccacgacaggccctggtgtgtgatgttccccttcctgtgtccaagtgttctcattgttcaattcccacctatgagtgagaacatgtgtgttcggttttttgtccttgtggtagtttgctgagaatgatggtttccagcttcatccatgtccctacaaaggacatgaacttatccttttttatggctgcatagtattccatggtgtatatgtgccacatttttttaatccagtctgtcattcatggacatttgggttggttccaagtctttgctattgtgaatagtgctgcaataaacataagtgtgcatgtgtctttatagcagcatgatttataatcctttgggtatatacccagtaatgggatggttgggtcaaatggtatttctagttctagatccttgaggaattgccacactgtcttccacaatggttgaactagtttacagtcctactaacagtgtaaaagtgttcctgtttcactactttgtaatgattgcctgtttcctgactttgtaatgattgccattctaactggtgtgagatggtatctcattgtggttttgatttgcatttctctgatggccagtgatgatgagcattttttcatgtgtctgttggctgcataaatgtcttcttttgagaagtgtctgttcatatctttcgcccactttttgatggggttgtttttttcttgtaaatttgagttctttgtagattctggatattagccctttgtcagatgagtagattgcaaaaattttgtgggagaaatttttagaattggatttgctgggccagaaggtatgtacttgttcagttttgataggttttaccaaatggtcctccattgaggtagttctaattgagaagtcagtcacagggcttaatggagtccttgggtgggtttcagtgtttccataatcagcatcctatattagtcagttctcacacttctataaagaaatacctgaaactgagtgatttataaagaaaagaggtttaattgtctcatggttctgcaggctgtacaggaaacatggctggggaagcctcaggaaacttacaatcatgactgtgggtgagggggaagctggcacatcttacatggctagagcaggagaaagagagaaaagagggaagtgctacacacttttaaacaaccagatcttatgagaacttactatcatgagaacagcaaggtggaaatctgcctccatgatcgaatcacctttcaccaggctcctcccccaacattggggattacaattcgacatgagatttgggtagagacacaaatctagatcatatcacacccctttaccccacctcacctcatccctcatatagttgttagcaatgtgcaagtgcatttgtctggggagtccataagctcttttgttgtctttttttttttaacagcttcattgagataaaatgcacattacataaggatcacccttttgaactgtacaatttagtggtaccatcactgctgtctaattccagaatatttttgtcaccctaaaaagaaaaccccatagtcattagccatagtctttcctcatttctcactccctgcagcccctggtagccatttaatctgttttctgtgtggagttgtcccagacatttcatatgagtggaatcatacactatgtgcccttttgtgtatggcgtctttcacttaccatatttttttcaagcttcagccatgttgaagcatgtgtcagtgtttattcttttttatgactgaataatattctattatatggatataccacatttttgataatccattcatcagttggtagacatttggcttgtctccactttttgtctgttatgagtaatgccactttgaacactcatgtacattttcacagtcttttaagaacgatttttaatatatagagtataaatcagtgagaaaaatgcaaattaattcaaccatcaatggacaatatatacgaatagataattcacgaagaagagtggtaaattttaaaaatgaaagtatcaatggctgtgtattcctgaagggatattccctctgaaagattactattttataactatgtgaaagaatattaattgttagcaggagagatcttgtggctggttacaggtagttcgagaatgatattcaagaatttaaagtgttatggttagacttttctgtggctcttacctcccttgagtatgagatctaaaggaaaatgtcttatggcttcttataacttcccagtgtgtatacactgcggttgtgtgtgtgtgctgacacatgttaaactttggttattgtatgggtacacatgttaaactttatatttagttataattttaaatttcaaaaagtacaaaaacaaaaaatagtacagagaacacccaggtattcttcagccagattcacctgttgttaacattttacccaatttgcttgcttattctttatctacctacctacccatccatccatccatccactatccatccatccatccatccatccactatccatccatccatccacccacccatccacccaccatccaaccatccatccatccatccatccatccatccatatacacacacaatttttttcctgaactattttagggtaagttacatacctcacagtattttacccctaattttttcagtgtgcattttctaagactaggtacattcttttattaacttcaataatttacattaataaaatagttcaatcacctgtcaatattacaattctgtcagtcgaccaaatatttactggattttcacaaagtctttgtgaaggggacattatttattcccattttactactgaaggaatcaactagctaagtgattcaacaaatgtcatattgctaagatggctaatattaataaagtactatgtgccaggcacttttctaagtgcataacttgtaaatactctctttaaatcttataacagctctttgaaatgaatcagggccctgaggaatacagagtaaggaacagacagagtgctcagaggaatgttaagttttaggctctttttctgcttctttagtgattaaataacatttcatgctttgtgtgtgtgtgtgtgtgtgtgtgttttaattttaaaacttaaaatctgaaaatgggagctggaatgggagcaggtattttctttttttttttttttttttttttttttttttttttttttgagacggagtctcgctctgtcgcccaggctggagtgcagtggcgggatctcggctcactgcaagctccgcctcccgggttcacgccattctcctgcctcagcctcccaagtagctgggactacaggcgcccgccactacgcccggctaatttttgtatttttagtagagacggggtttcaccgtttttagccgggatggtctcgatctcctgacctcgtgatccacccgcctcggcctcccaaagtgctgggatcacaggcgtgagccaccgcgcccggccaggagcaggtattttcaatattgctttagttgcatggtatatcagagcagctgtgaggtacattgttgatggaagtaataattttgcctcctctgtgtgtgtgtgtgtgtgtgtgtgtgtgtgtgtcacataattttcctgaaagccatatttgtatggtacattatagcttacagagaaccttcatgtctgttacacagttgattctcaccccaatcatttgaccacttataattgagttaggattcaagcctagctcaattataactggtcttctcctaatccagtggtgtcatcattactctgtgctccattaatagagcctttactttcaaggtagtcctgatgcagctcagactttaaattacccacgtcctttgcttacaactttatgggaaaagaaaaaagaaaaaaaaagaacaaattacccaagtctcgaaacttgctgataccttttttctccctttacaaatgttttttcttaatttataaaaattaagatagttttaagatttaatttttaaaaattaaggtagcagatagttttaagtcatgagggacaaaggtttagaaagattgaccttatttgaataatttggtggtatcaaatgaaacctgtagcaaaaataatcagatccatatttcattatatagtagtcattattgtgctatgtcgttgtgccaattaaattaagtgtatctatttagcatcagccccagaattattttgtttttggattggatgagacctttagaggactaatgaagtggctttaaacttttttgtacacagtccacagtaagaaatgtatttaacctctctttctctcttatactcaatctcatgaaacaactcttactaaatataatgcaccctttttcttttattctgtcctgtgcttttctgtcaaattgtttttgaaggctgtggtgatttactaaattgataaacctgatattgggttataataatgtcataagcactattctggtctaactctctctttttactaatatgtaaatacaccctacaaggtgacgtgatttatttttatttttatttttagattttccaattaattcattgcaatgctgggccaagaattaaggactcctaacttccaattttgtattttcatttaatgacttaaattactattacttttatttagttgcatcaagtatttcttttctttctttttttttttttgagatggagtttcacttttgttgcccaggctggagtgcaatggtgtgatctcggctcaccacaacctctgcctcccaggttcaagcaattctcctgcctcagcctcccgagtagctgggattacaggcatgcaccaccactcccagctaatttttttgtatttttagtagagatgggttttttccatgttgaggctggtctcgaactcctgacctcaggtgatccgcccgccttggcctcccaaagtgctgggattacaggcgtgagccaccgcgcccggcctccatcaagtatttctgaagacacgtgaagcagtggagtcattaactgaaataacaggaaaccattttgaggctcctttgaagatccctgtgttcaggacttgggtccctctattcttcaagaggctgtgcccatggtgtggctttgctgagagcatctggtgcatacttctgcttttacctctcttttggttgttctttatcttcattcagaagatgagattggtagggtttccccatcctataacctagcagggactttgtctattatctgttctcattctggaaactatactacatatcagaaggcattcttcattttaaaaaatagaaggaaatagtttgcaggatgaagattatttccttgataatctgccaaataaatggttcaggttgccagtatgaagcttctttaatttttggcaaatgggagctggttatatgcatacatacacacaaaacttaatagaaagagtaaaataaaattttgactgtcatgagattgagaagagtagagatagtgaaagtctaaattttctctttttttctgctttaaacaatttaatgagaaaaataagtgtacgtaagattcttaacaaaaatcaaattaagttttttaatgtatttgaatatttaaagtaggattgccacaaattaaatttgccaatgattttaactatgtgtgttttttaagaatgtatctataaatatgtttactgcaatacatatgcaataatgtatgttatgtaatttttatttaattgaaagattgtatttttatttttggtcagttacagtgaagaggttaatcagtaatggcttccactttatctatcagtttagagggcaagattcagccaaatgagaataagaactgttagaaagatgtgcagcaagtcaatgattaccatgtgattcatccataggttatcaatacttgatctgacttgagtttacatgagatattcgaatgtatttcttagcataaaaatcccattttaatttttttttttttttttttttttttgagataggctcttactctgtcacccaggctggagaacagtgatgcgatcatggctcactgcagcctcaacctcctgagctcaagtgatcctcctgcctcagcctctagggtagctaggactacaattgtgcaccacgatgcccagctaattttttaattttagcagagacgaggtcttcctatgtttcccaggctgttctcaaactcctggcctcaagcgttcctcctgcctcgacctaccaaagtgttgggattacaggtgtgagccaccactactggctcctatctagtattatatctaatttaatttatggtcattgagctcatttcttagcaacatcacagaaacaaggctttagtcaattttattaataaaaagagactataataacttacagtgtttatcaatcaataaggtttttagttttaaaaaccttattgattgataattaaattgataattaaattaaaacaagctgggccagcactttgagaggctgaagcaggaggattgtttgagcccaggagttcaagaccagcctgggcaacatagagagatcctatctctacaaaaaaataaactagccaggcacggtagcatgcacctgtagtcccagctactggggagcctgaggctggaggatctgttgaacctgtgaggttgaggctgcagtaagctgcaattgtgccactgcactccagcctgggtgacagagtgagattctttctcaaaaaattaaattaaattaaactaaaaacaaaatgtggacgtacttgaaactttgactcttacattgattcaaccttcaaaggaacttgtccatttgtgaaagttttccttttatataagtctttcttacagtcaaataagtgtttactaagtgaaatactacattttatagtgcagtggcactcaaaggaaactattttgcagctgtagagttttttcttttgtcctttttactttttccaaggcaagatgcctggtgggagagttgtctggaggcaggatgatcagaagcaggacctggccagctgttcgcttatttcagtctgtatgaaatcatctgatatgcccataagagagatgtgtcaattggctaatgggtcagagtattgattttatgttttcagattgctgacagagagattaggcttccagatacaagcagttccacaagtctctgttttcagacaggcacataattaaagtaaccacacagttctctgaggttagagttccatgctgtgatgcaagcctctctatttggtatttaaaagcagtttgaagctgttgtgtaagtatcactggacttggagtcaactgacctaagttctagccttggcccttctactgtcttaacagtggattaaatgatgaggcttattttaaagaatcttgaaaactatagtaatttcaacaagaggagattaattgaatatattatgaaacatcaagataattgaaaatctgtgctgccattattgcatgtcaaaggtcattttgatacactgtatgtgcaaaagcagtttaccaaacagaattacatacagtgtaatcctttttttcttatataggaaaatacccacttccccccacttaaaaaaataccaaacaccacaatgtgtgtatgtttagcctacaaatcatattttttttgcctaggaagtattgaataatttaaatattttatattcagatagctaaagatggcttgctgagataaaacattggagccctgtgtttggtgatagccgtgggtttcatttatttttactgtctttatcctctgtatttattgatagtattgaatatttattttcagaactattatagtgtatctgtttctatgggaagaaatgaatatttgaccacagatggttttcatttttttagtatggggcacgtggattgacagcctttgaaacttgaatgctgtgtaatattcaggtgcttttattgtttatagaaatgcctaatccttgtttgaaatttattaaatggtatgccatctgtaagcccctctaaattccacagattaattagcctttaaagtaaggttgccttttgtctaacttttagtataaactcttccatctgggaactttcacttttatgtccctgttcagtgttctgtgtacttcagcactctagtattaattatggacactggcattctaagtaacatgaagaacactaaaaataaaagtagactgaacaaagtggcaatgtccggagaatagtttgcatttggtgaataatcaatccatcatggctttgccattgctctttgtatgtgcgtgcgtgtgtgtgtgtgtgagtgtgtgtgcatgtgcgtgtttagcattacttaagagtgagatagttattcttcagggaaatttttacagatgatggtttcacaaaaatcagcctttttgtagtttaaataaaaaaacaccctttttgacatttcatgtaacatttccttgtgggttctgatttaaaggttgttgaaaatatttggtgttggcagatcacttggttggctttggcatacttctctttctaggaaatgtagtatcagggtgggaattgtgttgttgttttaaaagaaatagattacaggctggcacggtggctcacacttgtaatcccagcactttgggaggccgaggcgggcggatcaggaggtcaggagattgagaccatcctggctaacacggtgaaaccctgtctctaccaaaaatacacaaacaaaattagccaggcgtggtggtgggcacctgtagtcccagctactcgggaggctgaggagggagaatggtgtgaacctgggaggcggagcttgcagcgggccgagatctccccaccgtactccagcctgggcaacagagcaagactccatctcaaaaaaaaaaaaaaaaaggaaatagattacattctttaactttatttactggtctcagtaagagttattgaacactctagagtgtttactttttaaagtccattgcaaaatatatagaaattagtaattcaaccatctgtgtactcatactaatcaatgtaatataggttggcgctttttatgcacttaattttgccacctctctcacttccccaaagaaattagactaatgtataacaataggcttcataacttaatttagaaaacataacaaaaataatttcgctcagtaagtttctgttgtagtagatattgttggtattaaacaaaaaagtaggatcagatgtggtttggctttcaaggtataaaatctaggtggggaaagagagagagagttaacattcttgaaacaattgagagcattagagtgttccagtatatcctccaaattctaagggtataagatgttcagagaaaataaaaaatcagggtgggttagaataattgagttcaaatggaccttggaattaggttagtggaggagatagcattccaaatggaaataaacaatgcgaataaggaaacatgttagacatgtatggagattatgaagtagccttaaatgataagattggaggagtgtggcttgaatagctgtagatttagggcagaaggtctggttaggccgtgggaggtcacaatatggaagaccttaaaagaaaagatgggtagcagggatacatgactagcttgtttttgcaattgagtagtaagataaaaatattttcttaggagaagttatcttagaaatggtggacaggatgagatggaacacaattgaaataggagtctgttgcagtagtatagggatgagttaatgagtgcctgtattaggagagtggaagagggaatagagagaaagtaattactgagacacattttcactggaataaatttggtcattagtatatacttttaacatattcaatgagtgaatgagggattgagaaggactgaatatagtgaataaagtaaaataatagttactattgatagaaaatggatagatttttaaacaatctagttagagggagatagttcagtttgcacataatgaatttgaagtggtaataactgtaagaagtggccttataattaattgaatatatggttctggggcatagccatttaagggccagagatacagatttaagatgtatgtatatatgcatatatatttaaagatactttctgagggagtttctaaggggaaaattggaagattaataaacgagccttagaaaacataagaagaaattatttaacatttgggttttagaaggccttatttaatcatttgattttaacttatttagtttgagcagtgtgttttcaaacctcttttgaaacaactagtaacctatgctttgaaaaaattgttggttaaaataattgtaaaaatgagtatattctgatctattttgatctgattttaaaaccagggtattctgattcattataactttttctagattgctgtgctaaggagacagcaacgtatgataaaaaatcgagaatccgcttgtcagtctcgcaagaagaagaaagaatatatgctagggttagaggcgagattaaaggctgccctctcagaaaacgagcaactgaagaaagaaaatggaacactgaagcggcagctggatgaagttgtgtcagaggtaagtgttagtaatacggctgagtcgagatgggctaaagtatcctctggattaataaatagagaaacttttacattttaaattaaattatgtaaaataatagtgctaggaaaaggagggtataataagtcctaaaacatttgcagtaaggataaagcatttgaaggggaccctttgaattgtactccccaatctacatagaaaagttgtctccttttcctaggtttctcctcattcattgccttagcaccctcttttctggctaagtgaatcacactgaggcttctaaagtgccctgccatattttcccttttaaaaaagaaaacaatataaaagtgtttttattttttctcagtccacctaacaactaatgtgatttttgcattctgttactatgctgactccaagaggttttaatctcctcagttctattcgggaaatttgctgttttcagaatttctcactgcagtgctgaaccatatagatgcctactgaatggggcttcttacactctttttctcttggccctgagtacatgggaatactcctatattttactgaaaacaatgatttaaaaggttagggaggcaaactatagaagtgactcaaaattctttggggatccgtaaaaatataaaaaatgttgaattctggtcgggcgtggtggctcacgcctgtaattccagcactttgggacgctgaggcaggcggatcacaaggtcaggagatcaagaccatcctggccaacatagtgaaaccccatctctactaaaaatacaaaagttagctgggtgtagtgcacacctgtaatcccagctactcgggaggctgaggcagcagaatcgcttgaacctgggaggcggagattgcggtgatccgagatgatgccactgcactccagcttggcgacaaagtgacactccgtctcaaaaaaatatatatacatatatatattgaattctttcctcttgggtgaagaggcaactgcaatggagtggctgctgtgtttttttctcttctgcttctctccttttctctccctgctggaaaagggaacctggaagtctctgctctagtcttgaaaagtgttatttcctcacctttgattttttttttttttttaaataagacaaggtatttgtaagacaagagatttacgtaaccggtaaagaggaaaattctaatcttaagcgttgctttttctgaaatcgatgttagtttaattgtatttaatgtggtcatttcctttagaaccagaggcttaaagtccctagtccaaagcgaagagttgtctgtgtgatgatagtattggcatttataatactgaactatggacctatgaggtaagtgaatagatatttattttggacactaatgctaaaaacttaaattctcattattctttagcttttgtcataaactagagaaaaaatgatttgtttttcaagatgtgtaaagagtaatgagacaggagccatgccttcaaagatctcatgatccagctgggaggagagacaagtagaaggatgactatggtataatgtgatgaacataataataacagtgtgaatgagtcctaacataatatagagtacgagttccttgaggtgaaggttcttgtcgtattgatgggtactcgatacattttttgttgagtgactgagttataagggagatacctacgaaggaagctgaacattgaactgtaatatcagtttgccatgtgcaaagtatgagaaaggcatgccaggcaaagggaacagcatgtttaaaggcacagttatgaaatggcatgacatgttcataaaaaagtgaaaagttcagtgtatcttgtatatgtggggagtgtgcctgaggctagatatatggttagaagtataggtgctgctgtgtacaatgaggcatccctagcttttaggtggagggtaacataatcagctttgcatattaggaagaggactttgtgtgttgtattgagtatagactgcagtgaggagaaactattggcagagaaagcattagaagactattgaggtgtttcaggtaataaatgagagtctgaacttacactatggttataaaaaggatgagcaatcttagggtacctctctgatgtagcttttgtgggatttgttaactggtataatgtgggacatgaggaagaaaagagggaagttaaggataattcaaaaatttctaccttgagggaccgaatggtggtgctgtcatcggaggaagcaaacatagacagatggatagttttatgaagaaagacaatagtttttattttaagtataggaagtttgtggcactgactagatattgagaattaacattatagataggtaggtagactgacagacagataatgttagtggtgtagatgagattatccaaggagaacaagtagaggaaggaaagtaacaagaatctgggggacaccagtatgaatagtagatagccttgggaaaagaaactcacagcatattaggggcagaactgaaagaaagtagctttttgaagccaaagtaaaaagagcttcaagcaggtcttgggcagtggtatcacatgctgctgagagcttgggagatgtagaaagctgaatttggcaattatcaggtcagttgtaatcttggaaagcagatttagtaggggtaggcatgaagtctgtattaaaattggttgagaaattgaaaggagttaaaattgaatgatctcttttttaaaaaaaaacattttttatgaagattttcaaacatataggaaatttgagaaaataatatgatcaaccccttgctctcatgaaatttataatctaatataggtgacatatactaatcaaaatgatcacacaaataaatgcaaaattgtaacaatgttaggtgccatgaaggaaaggtacatgatatcatgaggccacataatagggtcacttgacctagttagggaagtaaggcaaggtttctctgagaaagaggtgattgtgttaacatctaaaagaagattaggaattatttaggtaagatacaggaagaacatttcatatagaatatataaacatctattcccacatttgtgttgtgtctttgtgtttatatgtatttagtttaaaaattttggttttacatgaaacaattatatacaaattgtgctttctttaaaatatgtgaatacattattctcttttaatactacatagttttttgtagtgtaaatgtgccataatttagcaattctctttaggtcttgggaacccctttgtacccttaaaagttaccaaggatcccaaataatttttgattttgtggtttatatatactgatatttattatatgagaaattaaaactttaaaaataaaaaatttttaattcatttaaaaataataaaccgtaaaccattactttacatgttaacataaataacatgttaatgaagaataattatatctcccaaacctccaaaaatttagtgagatacagaagagtggtactactttatagttttgtaaaaatattttttttggggggaagctcaaatacatcagttttagtttttctctatatacacatttatttgctactaaaaattgaaatagcatattgaaatttccttttgttgcaatccaaaattttgaaaaccagaaaaccaaattaattattattatgctgtggccagactactcagtattttctttacattctttcctccaagttactttccttcaaattcttaatgttgggttttatctcactgacttcaggcttctaaaacacatggggatacttgagacctattgttgcttctttaggtcaaatcaatagtttcataaaaatctttgatgtccgacttaacaggatctggcaggattatctgttttttcatgtaatctgttatgatatattgtttgggttgaaataaatgaagaaaatttagactcacatcggtatgcagttggaaaagggagaactttgcagactttgaaagacttttaggatccccagagttccttggactgcttaaaaccccagtgcacacttgcccaactgctgccgtaatttatttaaccatcttttgataggcagctagggtatttccagttacttgttgatatgtgtacataaaatgtatttccatatatttatgtgtctgtatgtgtatgatagaatctagactagagctagaggttacgattatctgaaattgtgatagagtttgccaaattgccttccaaaaagactgtatccgtttacattcccactagcaggagagaggagtatccattttctcgcatttcctaacactggatattgtatttttaaaattcttgcctatcttgtggatcaaaaatgttattgttagcctgtcacattggcctgtgtgctcttcctcaaacactctaagcctgctagcacttcatggtcttcactttcattcccactgccggcagtgcccttccctcagagattctttctgtcaggtgttaagctcaaataccatgtacccctgagcttcaaataaaagttttaaaaaagtgattaaaaaacatcaagtttttttggtcaaaattaaaaaaaaaaaaaaaagctcaaatgccacccctgtgaggctttcctggactaccttttctaaatgtctatcccagctcctgccattgcattccctatcgcctttctttcttcatttttctacatagcacctctccccttcaagtatgctatgtaacttatttattttctttctctccctggaggtatttttatctcttttgttttccagtgcttagaacagtggctggcacatagtagttactcaataaatacttgtagtatgaatgaatgtctccctcacccaattagtaggaattatatatgttcataaactatttctcaaaaaactgtgtgttcttttagttcctcatttcttatctggtatacgtggtacttatttatttagtcagacatacagcaaatatttatagagcacttaatgtttgccaggtactgagcaaggaatcaaggatgcaaatatgaataaaagtacagtctagtaagagaatcagatatgtaaacaactgttgtatgagaaagaattatatggatgtcatataaacatataggcattaaaaaaatgaaaaactttttgtttacacacttctgacaccagatatgtggattttctacactgagcaattctccaattctctggacaccaactggatgtcctacaatttgactcaattcttttttaaattttaattgtaaaatattttttattgagacagggtcttgctctgttgcccaggctggagtgcagtggtgtgatcgtagctcactgcagcctccatcttccaggcttaagcaatcccccgatcctcagtctcctaagtagctgggactacaggtgcacctcaccacacctggcaaagttgctcaggctggtcttgaactcctaagttcaaatgattctccttccttggccttccgaagtgctgggattacaggtgtgagccattatatctggccaatttaagtcatttctgacactacctggagctagcacaggctcccacaggttaagggctgagtatccaaagactgcccctgacttcagtcaccagttgcaagtcccaggttgtgacctgtaacttctgactaagtggctataagttgagggttcccacaattccctcttgaggtttgataattttctagaatggctcacagaactcaggaaaacactctatttactattactggttttattataaaggatatgtggggcaagctaaatgggagagacgcatagggtaaggtataggggaagagtgcagagctttcatgccctctccaggtgcaccaccctcctagtacctccttgtgtttgctaacctggaagctctccaaattccattgttaggggtttttatggagcttcattaggtaggtgtgattgattaaaccattggccattggtgattgcacttaaactccagccccctctcccctacttggaggttgagggatgggactgaaaatcccaacccactaattatgtggttggtttctctggcaatcagcctccatcatccaagagtcacctcattagcataaactcaggtccagctggaaggggcttattacggataacaaaagatgctcttcttaccccctatcactcaggaaattccaagggttttaggagctctgtgacaggaaccagaataaaaaccaaatatattatttcttattatatcgcaaattcacaggcatattcttgagggaacatagaagtaaccagtaacgctgctagtggcaatcatgggaggctttatgcagtagtactcgatgaaggaataaagaggattagattatgctacaggaagtgacagtggggttaggggggacatctcattgtggaagccctcatgaatcaatagaattttaggaaagaaaagactggaacaaaaaaaattttttgagtgcccccacccaccagacaaaaaatttttaaaaatgaattaatgatcttcacagctgctgaagtaaaggtggggatggatctcatttccatggtagattgattgattatgaaaggaagagatgatggtccctattttatcaagaagtggtttgtgttcaaaaaggagttagtagaaagaggggattaaaaatcggagaaagcttaaatatttgaaaatcttgaggatcaatcagttaagatctgtatctttctctgtgtgatgctttaggaacagccagcgaagaagtagtgggaatattaggaactattcaagttaaaaaaacatgttaaaaggcttaacttgaagaaaagcatcaaggagaaaagctggaaggaatgaggaagtgtaggaaagtatcttaacaagtcagaatatctttgacaccaacaaggaaatatggaggaaactggctgtgaaatttataaaaaccaagaactatttcttgtagacaaaatttggcatgaacagtgaaatattaaagcccagagaacaacagtgatttgaaagactgaaatttgtccctgaatcaaatgttgggaattgagatgtttcatcatttgtgttattcaaaagaattttttgattggccccattttttttttttttttttgagatggagtctcagtctgttccccaggctggagtgcagtggtgcgatcttggctcactgcaacctctgcctcccaggttcaagcgattctcctgcctcagcctcccgagtagctgggattacaggcacctgccactatgcccagctaattttttgtatttttagtagagacagggtttcaccatgttggtcaggctggtctcgaactcctgaccttgtgatctgcccacctcagcctcccaaaatgctgggattacaggtgtgagccactgcgcctggcctgttttcagtctttttactgcaaggctatgatcttctctggtccgggagtctgccagaggagcaggaacttcccagttgaaccttattagtaaccacctggaagatatttattgaacaagtgtcacatctgtagtcttgtgtatctagaaaccttaagcatgcattattatgttttaattggaaaatgcataggctttaaaaaaaaagattgtgagctctatctgaacttttgttaagtaccacaaaattaagtttgtcagacaaatagacatttgaatcagagatttccaaagtattttaaatttaggaacctaaactcttttagaacagatcacattaccgagtaaagtgattaatgtggtttcagatgttcagcgtagaactgaatgtttgtgccttattggtatgggccaaatgaaaaaaaaaaaataaaacacacaagtttgccaaatattggtatgccttaaacatttcctgaaggcatttggtgatgaaatataaatatatctaatgtataaagtaagagagttttgtcaaaggtaatatgcagcaaagctgactagtttgaagaggtttgggttactgaatagacgtcacacaggaaaaaaaaataaactaaatggacttataagggttaatttttctgaccttatcgatattttgtggatagtaaagaagtcatctagctatttttggcataggattcaaggagctggcccactctgggtggtctataaatagtaactctaggtagcagggactggctaaacaggacaaatgtgaattggttaaaaagaaaatcctcttcttattactcattggggttaattctatgattattagtcatattttattgttgagaacctgaaatttaacccaggttttttttcttttttttaaattatcactacagactctgccttttctactatgctgtaaagtgttactttattttattttttctaccttaaggttaaggaaccttaaccttttgtttttggcaatatggtaggctaaaggtacaggaaactcattgcagtttagcacactaaaaaatgatggattgaaaaaataaatcaaaactcttatttcctggctccactggagacaaagtaagggcttctcagaggccagaaataataaaagataagatgagtctataatgataagctagcattggaagtggtgcttgttctggatatagttcctgatccttgcggcgtagtgtctggggatgggaaagaaagctgtggacccaagtgaggtgggaagtcacaactgaggcctcccttttcctctacccaaataaagccagaacttccaaagaatgacactcttggttgccaaaagaggggaacaaaagttgccctaccactcagggagactgttattaagtacctatcttggttttggctttagttagagtggaaacaaatgaaaagtctttcctgataattctttactcaaagcccctacctaatcaggttagagcctaaatttatactactagtgtgatccccccaaaatcaagacaaaaatgcagtttaggtgggcttatgttggtggtgcctgtaggcacctgagggaattgaatgcaaattcttctcagaagagacactttataaaagaaagtgtccatcctagaaaaactggagacccatctcatatgcagagacacacacaggctcaaaataaagggatggaggaagatctaccaagcaaatggaaaacaaaaggcaggggttgcaatcctagtctctgataaaacagactttaaaccagcagagatcaaaagagacaaagaaggccattacataatggtaaggggatcaattcaacaagaagagctaactatcgtaaatatatatgcatccaatgcgggagcacccagattcataaagcaagtccttagagacctacaaagagacttagactcccacacaatcataatgggagactttttttttttttttttttttttttggtgagacggagtctagctttgttgcccaggctggagtgcagtggcgcgatctcagctcactgcaagctccgcctcccgggttcatgcataatgggagactttaacaccccactgtcaacattagacagatcaacgagacagaaagttaacagggatatccaggaattgaactcagctctgcaccaagcagacctaatatacatctacagaactctccaccccaaatcaacagaatatacattcttctcagcaccacatcgcacttattccaaaattgaccacatagttggaagtaaagtagaccaatatccctgatgaacatcgatgaaaaaatcctcaataaaatactggcaaactgaatctagcaacatatcaaaaagcttatccaccatgatcaagtgggcttcatccctgggatgcaaggctggttcaacatacacaaatcaataaatgtaatccagcatataaacagaaccaaagacaaaaaccacataattatctcaatagatgcagaaaaggcctttgacaaaattcaacagcccttcatgctaaaaactctcaataaactaggtattgatggaacatatctcaaaataaaagagctatttatgacaaacccacagccaatatcatactgaatgggcaaaaactggaagcattccctttgaaaactggcacaagacagggatgccctctctcaccactcctattcaacatagtgttggaagttctggccagggcaatcaggcaggagaaagaaataaagggtattcaattaggaaaagaggaagtcaaattgtttgcagatgacatgattgtatatttagaaaaccccattatcttagcccaaaatctccttaagctgataagcaacttcagcaaagtctcaggatacaaaatcaatgtgcaaaaatcacaagcattcttatacaccaatagcagacaaacagagagccaaatcatgagtgaactcccattcacaattgcttcaaagagaataaaatacttaggaatccaacttaaagggatgtgaaggacctcttcaaggacaactacaaaccactgctcaatgaaataaaagaggacacaaacaaatggaagaacattccatgctcatggataggaagaatcaatatcgtggaaatggccatactgcccaaggtaatttatagattcaatgccatctccatcaagctaccaatgactttcttcacagaattggaaaaaactactttgaagttcatatggaaccaaaaaagagcctgcatcgccaagtcaatcctaagccaaaagaacaaagctggaggcatcatgctacctgacttcaaactatactacaaggctacagtaaccaaaacagcatggtactggtaccaaaacagagatatagaccaatggaacagaacagagccctcagaaataataccacacgtctacaaccatctgatctttgacaaacctgacaaaaccaagcaatggggaaaggattccctaagtaataaatggtgctgggaaaactggctagccatatgtagaaagctgaaactggatccgttccttacaccttatacaaaaattaattcaagatggatcaaagacttaaatgttagacctaaaaccataaaaaccctacaagaaaacctaggcaataccattcaggacataggcaagggcaacgacttcatgtctaaaacaccaaaagcaatggcaacaaaagccaaaattgacaaatgggatctaattaaactaaagagcttctgcacagcaaaagaaactaccgtcagagtgaacaggcaacctacagaatgggagaaaatttttgcaatctactcgtctgacaaagggctgatatccagaatctacaaagaactcaaacaaatttacaagaaaaaaacaaccccatcaaaaagtgggtgaaggatatgaacagacacttctcaaaagaagacatttatgcagccaaaagacacatgaaaaaatgctcatcatcactggccatcagagaaatgcaaatcaaaaccacaatgagataccatctcacaccagttaaaatggcagtcattacaaagtcaggaagcaacaggtgctgtagaggatgtggagaaataggaacacttttacactgttggtgggactgtaaattagttcaaacattgtggaagacagtgtggcaattcctcaaggatctagaactagaaatgccatttgacccagccatcccattactgggtatatacccaaaggattataaatcatgctgctataaagacacatgcacacatatgtttattgtggcactattcacaatagcaaagacttggaaccaacccaaatgtccaacaatgatagactggattaagaaaatgtgtcacatatacaccatggaatactatgcagccataaaaaatgatgagttcatgtcctttgtagggacatggatgaatctggaaaccatcattctcagcaaactatcacaaggacaaaaaaccaaacaccacatgttctcactcataggtgggaactgaacagtgagagcagttggatacaggagggggaacatcacacactggggcctgtggtggggtcgggggaggggggagggatagcattcagagatacacctaatgtaaatggcgagttaatgggtgcagcacaccaatgtggcacatatgtatatatgtaacaaacctgcacgttgtgcacatgtaccctagaacttaaagtataataaaaaaaaaaaaagaaagaaaaatttccagagatacagagccagttgaacatgagcacatgtctgcttctttccctcaaaagtcattaaacacaccaggaaaccataccaccatgaataagagttagaaaaaataaactacagaatcacactctgaaagactatagatatttgaattatcagatagagaatataaaatatattaaaagacagaattaaagtctggtaaaggaacaaaagactaccagaattggccagaacattttgaaaaaaaatctggaaataaaaatttaagttaaaattataaaaacaatgaccaggttaagacagcaaaataggtatacttggaataggaacagctccagtctacagctcccagcgtgagcaatgcagaagatgggtgatttctgcatttccaactgaggtacagggttcatctcactggggagtgccagacagtgggtgcaggacagtgggtgcagcgcaccgtgcatgagctgaagcagggtgaggcattgcctcacccaggaagtgcaaggggtcaggtagttccctttcctagtcaaagaaaggggtgacagacggcacctggaaaatcgggtcactaccaccctaatactgtgctcttccaacgggcttaacaaacagcacacgaggagattatatccagcacctgacttggagggtcctacacccacagagcctcgctcattgctagcacagcagtctgagatcaaactgcaaggcggcagcgaggctgggggaggggcacctgccattgcccaggcttgagcaggtaaacaaagcagctgggaagcttgaactgggtggagcccaccacagctcaaggaggccttcctgcctctgtaggctccacctctaggggcagggcacagacaaacaaaagacagcaataacctctgcagacttaaatgtccctgtctgacagctttgaagagagtagtggttctcccagcatgcagcttgagatctgagaacgggcaggctgcctcctcaagtgggtccctaacccccgagcagcctaactgggaggcaccccccagtaggggcggactgacacctcacacagctgggtactcctctgagacaaaacttccagaggaacgatcaggcagcagcatttgcagttcaccaatatccgctgttctgcagccaccgctgctgatacccaggcaaacagggtctggagtggacctccagtaaactccaacagacctgaagctgagggtcctgactgttagaaggaaaactaacaaacagaaaggacatccacaccaaaaacccatctgtacgtcaccatcatcaaagaccaaagatagataaaaccacaaagatggggaaaaaacagagcagaaaaaccagaaactctaaaaatcagagcgcctctcctcctccaaaggaacgcagctcctcacccgcaacagaacaaagctggacggagaatgactttgacgagttgagagaagaaggcttcagaagatcaaactactccgagctaaaggaggaagttcgaaccaatggcaaaaaagttaaaaactttgaaaaaaaaattagatgaatggataactagaataaccaatgcagagaagtccttaaaggacctgatgtagctgaaaaccatggcacgagaactatgtgacgaatgcacaagcctcagtaaccaatgcgatcaactggaagaaagggtatcagcgatggaagacgaagtgaatgaaatgaagcatgaagagaagtttagagaaaaaagaataaaaagaaacgaacaaagcctccaagaaatatgggactatgtgaaaagaccaaatctacgtctaattggtgcgcctgaaagtgatggggagaatggaaccaagttggaaaacactctgcaggatattatccaggagaacttccccaatctagcaaggcaggccaacattcaaattcaggaaatacagagaacgccacaaagatactcctcgagaagagcaactccaagccacataattgtcagattcaccaaagttgaaatgaaggaaaaagtgttaagggcagccagagagaaaggttgggttacccacaaagggaagtccatcagactaacagctgatctctaggcagaaactctgcaagccagaagagagtgggggccaatattcaacattcctaaagaaaagaattttcaacccagaatttcatatccagccaaactaagcttcataagtgaaggagaaataaaatacttcacagacaagcaaatgctgagagattttgtcaccaccaggcctgccctacaagagctccggaaggaagcactaaacatggaaaggatttataatcccaaaggattataaatcatgctgctataaagacacatgcacacgtatgtttattgcggcactattcacaatagcaaagatttggaaccaacccaaatgtccaacaatgatagactggattaagaaaatgtgacacatatacaccatggaatactatgcagccataaaaaagatgaattcatgtcctttgtagggacatggatgaaactggaaactatcattctcagcaaactattgcaaggataaaaaaccaaacaccgcatgttctcactcataggtgggaattgaacaatgagaacacatggacacagaaaggggaacatcacacactggagactgttgtggtgtggggggaggggggagggatagcattaggagatagacctaatgctaaatgacgagttaatgggtgcagcacaccaacatggcacatgtatacatatgtaacaaacctgcacgttgtgcacatgtaccctaaaacctaaagtataataataataataacaaaacaaaaaaatagatatacttgaagaaagaaatagtgaatgggacgatggatctgaagaaattatatagaatgtaacacagggagacagagagatagaaaatgtgagagatattggacaagaggttatgccaccataactaaggaataaagtaacattcccagtcatgagacatattgacatctgcagctcctgatgggatgcactgagaagggcacagtatcacttctatgatgttcttgtcccaaaaaatgtataacctgaattgtctttaattttattttttatttttatttttagagacaggatcttgctttgttttccaggctggagtgcagcagcatgatcatgactcactgcagtcttgaactcctaggctcaagcctcctgagtagttagtactctagatacacaccaccgtacctggctcatttaaaaaagtttttttgaagtgatgacatcttattatgttgctcaggctggtctcgaatttctgggctcaagtgatgctcctgcctcagcctccttaagtgttgggattgcagatgtcagccagcatgcccagccttactctggaatcttaaaaatattgctaactgagccctacccaagacctatgaagtctgatagggtaggtcaaaggcatttgtttgtaaaccaaacatttttcccaggagattctgaagtatgtctagggttgaaaactgttgtgtgtagttttgtatttctttcttcctatacattgttttgtatagttttgtatttctttcttcctatacattagccactatggaaattgtaaaagcacttattcattagattataagataatgtacgtaagggaagtttttattaaaatgtctctagacagacacctctgtatagataggtttgtctcatatacttgaggacatttatggacctctgttttggacagagtaggggccacagcataatctgtgaagggaacttcttcctggcacataggattgcagattatagattcctttgttatgttttcccctttctattttaaaggtcactatagtcatcctcctttgctgcaaatcataaatgaacatactaaggaggttttaaatatgttttagttaggtcttaaaaaaattaacaaatgtttggaattgacagtgcttttaccctgtttttgttctgggttaatgctgcgccctcactaggtctggaatctttatagtttgagacatcagacttggatgaggaagggtaaatcatgctactagtgggccagttactctgtggttttcttatgagactgtgctttaaggaaaaggtaaccacggagcatatggcattgagtttgagtcatgtggaactggttagaagtaaaatgtttctattccagcattctctgagtttgtcagcttttcattattttataggaagaattctagcttcttatcctgagatgagcttgtctccaaatctggttccaattttttgttgttgttgttgagcacatttcgccatatgatatcactattggctgtaggttaaaagttaccgtgtaacttaaacgtcagaattcaaaccaccaagtatacacggttttgttcagccagatttttaaatgaaatctaatttgagtttttggctaaaagtactttccacatttatcaaagtgacacatgaactgaagaaatacaatgtatctgagtaccaggtgttactgaatctggaattgcaggagggtaacagagccaaaggcagtcctttcctcaaatagtcttaacgtattcatgtttgtcaaaaatgtgtctacacaaagtaattggttctcttttctctgtagatttcatcctttgttgaaaaagatgtcttagaacctatcaagtgcagagctgggttttgagggcatggaaaattctgttgatgcttttctctagttttggctttcatgtgagttgtacatagggaggcttataaggagcatcctagtggctttaccttgtatcacttggctactttttccccacacttcattgttgtaatgaagggaaaggcagctgaaaccagaaacctacatcccttgccaacttaagagataaaaggaaatttatctcttctgctttctacctagtgagaaggggtcggtgagaaactaggccaggtgagaaaactactatcagagtttaagttgagtacttcgatatgttcttcagaccatacatcttagttaacataaaacaaggactagtggatagtttgtgtgaaatagcattttcaaccaccattttcagtacttaatatagctgggtggaatcatgctgtgtaagtgctgcagaacataaataataaaggaaataaacatcttaattttgtaacaagtgaaggtctaggctaatattaagggtagtataggatacttttgaagcttttgaatgtacagaagtacatatgtaattattatatattgcttagacttctaggcagtttgccattcatgtcttttttgtctccagattgagctgttttgtcacattagtgagcatttgaaacataattttaagtgtcattctacaaatggttcttaattgatttatgactaatgtcagtatgaactgcaggtgtgtgccgtgcctttggactttttggtgtctgtgtgttctgaacataaattggccttagtatgttatgcacactgtcagtttatcacaatccatggcctctgaggagccagaagtacggaatgtacagacgatctatgtaccttatattattttctgtctcagccctttcccagaattcccaataaagcagatttctcaattacttgcttttatttttcctttctcccatttttttttttttggtaaattaacaatgagagataaatggaaataaggcagttggaagaaaagaggatgaaaacaggtgaagattcttagttgtggaataagctaggttggctatgggttgataccatgtgtgcttgggtagtaaaggtagctagttttttctgcgtgttgtattaagccattatttatcaaatactaattacgttttatgcactaaatactagtccaagtattctatttgatatatggattaattcatttgttcctcctagtgccatgaggcaggtattattattcctgatttacagatgaggaaaccgaagacacagctaatatgtggcagagatcagaatcacaatctgcctctggagccttggcttaatcactgacagagcaacagccactcaggcagagaaaaaggagttggcatttacagttagaggagttaggactttagtaactctgcccgtttccctaaagcttaggattggctgtgataggggaaagtagcttatgaattgactggattgatgtaagtataacagaaaagagagattgtactcaaatttacagccatgttttttgacatttagaataatcagaggatacttttctgtagtgagaaatatacaaagagttgttcacacacacaccttttatattaaacactgactcagtgatgtcagcaatctaattactatagagtatcagttatctaatactgtggaacaaaccaccccaaaacctaaacgcttaagacaacagcagttattattttggtaaagaaatctgcaaattgggcagagttcaggacagacagttcttctttgcctccgtggagtgttagctggggtggcttaggttggaggacccactttcagattggctcattcacatggccagtaagttggtgacggctttcagctgggacctgagcctgggatgtgggccagggttcttggtttttcttcatttggacctctccacagctgcatgggtttcctcacagtttagtgtctgggttccaagaataagcatcatctattagaatagtgcttgctttataattgcttattgaatgaatgaaagaatctcaggttgttttcttgctcatgttggcccatttggcaaatagccactgtaaagtgcaggtttcttcccagagcacggtaatccctggctctgagaactgctatttagagggttcttttatcttgacttgaaggtctatttcttcatttaaccacatttatgtttctaataaattacccccagttactactaggctgcaaaaatcatctctgaaccattcaataaacagagaaaagaaaacctttttaaaatttggaaactaccttgaaaactccccattttttcctccttttagtctcagttgcattgaaagttaacataatgttctgttcctggatctggaaatggtgtaatagtgacttcaccacctgccattcttgagttgtgggttagtttccctaaaatgtagatcttgacaagaggcagatggtgcatgaagtttatttatttgtttattttttgaaaaaggaatacctcttatgaaccaggaactagaacaccccttagcttacattctaacaagaagagagacaataaacataagtaaaatgagaaaattataaattctttggacaaagggataaagtatagtagggtaaatggttttacatgttgaagggtagttgttgggactgtagttttatttacttatttttaattttttttgaggcaaggtcttgccctgttccccaggctgaagtacagcaatgcaatcacggctcactcagccttgacctcctgagctcaagcgattgttccacctcagcctcctgaggagctgggaccacaggcacactccaccacacccagctaattattgtattatgattattattatcgtagagatgaggtttcactgtgttgcccaggctggtctcaaactgctgggctgaagcagtctgcccaccttggcttcacaaaattccgggattacaggtgtgagccactgttccctgccaggactgtagttttaaatggtgatcactgtaaggcaggtgtttgagccaaggcttaaaggagaggagagggttagccatatggatatctgaggaagaacagcattcttggcagaggaaacagccattgcagggatcctggggtggaaatgtgtcttgcatgttcaaggaaaaacaaggtggctttgctaaagagagagtagtaggagatgatgtcagagaggtgagatacagggagaggtcaattgaggtaagacttctgtcgttttaaagatttgggcttttaccatgatagaaatgggaagccatcagaaggttttgagcagaggtgacataataatctgacctagattttaaaaggatcactttagttactatgttgccactagcctgaacctggtaggcaggaagacaagtgtcctgctctgtgtcatctttgggctttataaaccatgttccatctgttgtctcatttgaatctcaggaaaaccttgtgaaatatttgttatttttcatgttttacatgtgaggaattggaggcttagagaagttgaccaagtatcccagacatactcaagtgagcagtctcagagtaacatcttgaacccagatctcctgtctccaaattttgtgctcattccactatttcacattaaaacctgaagatctccctgctcttttcatcttaacgtaatttcagctttttgtgtgtggctctccaagccacagagcagcagcagcttttgaggataagaagcagtttcttttaaggataagaagcagtatggttcttacctggtaagatggcttgaattcaaaattgacctacttgtaccataagaaagcaggtttgcaaggagtagaatagacttggagatatgccattttttgttcagctacttggtatgaagactgagtatctgaaaccacactgtaaggattaagtggcttcataaataatctaaaacagttgttggcttttagaatttaataaatgaaaaagtaaggtaacaattcttataatactttttccagactttcggggaaattgaaatcatttgtgttttattaatccatgcttttcaggaccaatggcccataatgtgagcaaggtttattggtgtaatgattattttgtggcctaaaactactgtgactctttggactagcatgtttctgatcatagagacagctagagacttcttcttttttcttaatatttgtagcttgttttaaacgtactgagtagaacctgatttaagcaattatacaaagtttggttagattgctttattaatattatgaactagaaacagtcaccaaatgcgcattcattatactaatccttactatgattgagtcatttctttgagttcttggaaatctaatttttctaaaattaacaaaaggggacatttgaatgatgcaaaagcactcatggcaagaatctaaaagttcatataaataataattttctcatactcttttatacatttgaccattacaagatctgtcaaattcctttcaatatttgtgatgtcacagtcgtactaaaacaatcttgaattctggcagcgaaatgaagttcttacctgtctttcagatgttaataaaaataagggaaatacaaacctgtagttattcagatggttaaaattagtttctgtgggtcatttcatagagttcaagtatttaaatgtttttttagctgaattggacaatcaacttgtctgtaatttagcttaagagaaattccattttaagacaaaaaaactacagggaatgtaggccaaaaaataataacaaccaaaaacaaacaagtgaaaaacgttaaaagattcttagcagaatttattaatatattacctcttcaaaatatattctagccaatggatagataataaaattgagacccacagactatttggatcctaaattttgtttcatcatgactcccttgttgaaaatactttattgactctgtgtaatgtaaataagataatttttgtgaagctcattgaatgcgtctgagctccttaactcaaaaaaggctaaaagttactgaaatagctatggttaagggtatattgtcattacaatgtgataatcattaccaaagtgggcacttggaaaaatagtgaccacttatgagccaaaccaatcaacattaaaactgatttccagtaagtacagctgccaagtgattatagagcagcctggatacagatgggatagactacaaggatagttaagctcaaagcatttgcctgttaacagccatgaattgtgaggtgaaatgccagtttacatagtgttagtaaaatcattaaaagaacaatgattagtagaagaattctttacaaaccttaaagtatcaatagttctgaattaattcaatttataaattatccataagtcatacaaatagccactttgtactttttcatgtccctccaaactcccccagtccctatttccaaactgtccacttctgttgaatctattgtaaaaatgtgtaccttttagggaactgagataggaaagatgtgaaaaacaggattagtttagaataatggttctcaaacattggtaaagtcacctagactagtacaaccactgcggaaaacagtgtggagattccttaaagaactaaaagtagaactaccatttgatccagcaattccactactgggtttctacccagaggaaaagaggtcgttaaacaaaaaagatatttgctcatgcatatttatagcagcaaaatttgcaattgcaaaaatgtggaaccaacccaaatgcccatcaatcaacaagtggataaagaaactgtggtatatatatatgatggaatactactcagtcataaaaaggaatgaattaatagcattcgcagcaacctggatgggattggagactattctaagtgaagtaactcaggaatggaaaaccaaacagcgttatattctcactcataagtgggagctaagcttgggatataggtgcaccaaaatatcacagatcaccactaaacaacgtactcatctcaccaaatgccacctgttccccaaaaacctatggaaataaaaaattttaaaaaaagataattattaatccagtttttggtgaatcagtgagtgacagtggttatagtagtggtggtttaaatcaaggaataaatgttttcaaagtgaaaggagcacatcctaccacacagttcaaaaacaatcacaaatatggcaggcttgctgagagctttcatacatcatttattgtcatgcacttgtatgattattgtatactgtacacatttttattttacaatgatttgtattttccaatgcgtttattgcagttcagtgtggtagatggctggagcctatcctggtagctcggcgcacaagtcaagaattaaccctggacagggtgccatccctttgaagggtgcactcacgcatgttccgcacactcattcagactggagccatttagacgtgccagttaacttaacatgcacatctttgagatgtgggaggaaactggagtacccacaggaaactcatgcagacttggggagagtatgcaaactccacacagacagtgaccttggctgggaattgactttttttttgtcatcagtgttatcacaaaatgacattgcatgaaccagcattgtttgaagacttgctgtattctgattttttttatctttcatctttgagtcattagcaccaaatatagttcttggaacataataggtatttactacatgaataaattaatggatgaatcattcattctgggaaatgttgtcaacatagtgcagtgatggaattccaatcctgaatccaaatcctgactttcttagttatttagagcataaacttgggcaaactgtttaaactctttgagcttcaacttcctttgagccttcatttccttagtacatagtaggtactcaaaagtggtagctactgttaaaatatactgtatttgcatcttagaagagcatttaacattcttgtgatatctttatggtcaagatgggaaattttgacctaggtggtatttcagttaattcataagtagataaacctacgtttttacagatttagaaggagctttttattttaataacaactcagtacaggatattgatggcatgctgatactttcttggaagaatttcttttgctaatgaggagcctaaaagttcttgattgattagtaggtaagtgtttttaaaggaattgatataaattattcagctggatcctaaaactcagttacacaaattcagagttgaggtgggataggaagagaagcaaaagtaatggttcaaaatcgatttgtgtgaaaggacttagggttttaattacactgggctcaatataaatagagtgtaatataactgccaggaaagcctatgcgatattagactgcatcagtagaacaacagtgtctagaacaaatggaggaattatccttttccattctgtagtggtcatactacctaagaagtactgtggccaattctggacattacctctgagaagcatgtttataggacagtgatcaaatatgctaaaggaacttcagactatgctgtaaagaggagcatgtgaaagaatcaagaaactataatcttgaaaaagaaagcctggggtaagggggatgttagatgtctttggacattagaagaaggcttacttagacttgttctggatagccacagaatccagaactagtatcaaaaggtggaagtttttttgttttttgttttttaaaaaggaagcacatttctagttaaaacaaggggaaactcttaataattagggtggtagagatactggagggatcagggagtgagtacttccaccaaacaggaacattagtatatggatatttcactaataacaatagcggggtcagtaggggttgaattaattgagattctctaaacttaggggaaagttcttaactttgattttattcatagcttactttcataattagaatttttggcaccatgcttgaaagaaaaagtaaacactttttttttaaagttagtttcctaaagaagaaataaaatttcttagttgtcatcacactcttcatttgacttccctcccaaattgctattgttttctgcttctctcatgttttcttaaatactcatcagggtgacttttcttaagtttagacagacattccactaggtctcttacctcatttgtggcaaggtttatattgatgtgtgactgctcaggtaaacctttagtctgaatgatacagctatgacaaaatatagcctcagttgtagcaaaattaaatgttacacaatggctttaattggtggtacacctttgaagagtttgcagtatgcccaagtgctaaagcataccatgtgagaatcactgggtagcaatgatttctgggggtgaagaattgaggagaatggaaaatatattaagggatcagaaaaatattctagagaggtgtgtctgctccccgttttcccccaacactgatttccccaaatttggagacaaactactattatctcaaagaaccgcttttcctttagaaccacaggctccttaactaccctttttcattagccttactttcctcttgcattttatccctccaaatagaatcttttgtgcttctctagggagattccctttgtgttgaattttatgagtagtgtaaattgtgtgggttgcatcataaaacaaagtgcgaacacacacacaaagtcttattgatgagccaagttcctaagcactattaatgagttaaaagtgttaattaaggctgggcgcagtggcttacatctgtaatcccagcactttgggaggccaaggtgggaggatagctttagctcaggagtttgagactagtctgggcaacatagtgagacctcatttctactaaaattaaaaaaaataaaaattagccagatgtggtggcacatgcctatagtctcagctactcagaggggctgaggtgggaggattgcttgagtccaggaggtcaaggcttcagtgagctgtgattgtgccactgcactccagcctgggtgacagagtgagaccctgtctcaaaaaaaaaaaaaaaaaaaagttaagtaggcagtatttgcttatatgtatatattttgttgttttctccaaatgcttatgcctctgaagaggatatacattgatgagtgaagatattagggagggtagggagaaagaatagaagtttttacatataaatacaaatagaagtatttaaaaaatttttttttcttagctttatctgatagcctgccttctggaattgtgaaaggctaacaatgaatttgacttttattcctacttcatttgaagtattctctcattgaaaacaccagtttgcaccatccaggaggccttcttatttcagttattattggagtttaaaatttgtttttaggtgtgtcgtatttatttctacttcatatatacatgtaattatcaagtttttaaaacatatagaacactactattgtttaaacagtttataaataaggtacttttatacttagaaaaattgtttttgatatgtgcaggttaccatgctaaggatttgaacaccttcagtaccctatttgtacttgcgtctatgcctagcatttttgttacgtgcatggatctgcaaaggaattgtggtttgtttcacagctgcatgtagcaggcatatgtgtgacatatttttatttcagctattatttcctgttttttattttcagcatgttggaacaggattccaggagaatgaaccctagtgtgagccctgcaaatcaaaggaggcaccttctaggattttctgctaaagaggcacaggacacatcagatggtattatccagaaaaacagctacaggtaagatggcatgcatctatcttttggcctaagtgatttaatgaagctgaaacaagagaattatctgtagtataacattgcatctaaattgttcgtgtatattttgagtagtagaacacataaattactgaaaccattaatacattttacttttaatattgtaaaattaaatttactttgaaaccttttgtagttttaaaattcctatagagatgtaatcttaaaatctcagtttgtgtgcattaatatacatattgaaatatatacatattatatataatgtctttaataattattttatctatcatgtgtttatacatataatacatctaatatttgttactgtctcacctgtggatggatatgatatggtggaataacatgattgaacctatttgcagtcattaggtaaaatcatttatactcatttattgtgatctttgttgaatccctcccttgttgcaatttaataatgacttgataaatttccatattgcttgtcaatagcaaaaggctttaattgtataaaaatgcaatttctatattatgttaactagaagaaggtatagtggacatttttatagttgtatactttttgataaacatttccctgtgttatttagaatttgtattagagccaaatggagccaggtccttgactaacaaggcaaagggaggtcacagtatggtaactattgcacagtataatgcttgaaaattattacagatttgtttacttttatctctttaaggatttgtaggttgagggcaatctttcttcctgatttttactgtgttacatccatactgttgaaagatgatcaccacaatcctgcaggcttgtctccacttagccttcctgaaaaaactgttatttttgtggagtacagtatgccaagtcagtggaggacccaaaggattttatggcagtagctgcaacgcaacatagcaatgatagatgtcataatgttggaaaacatagcatttcctgcttttttacatgccaaaattcatcatacttcttaaaatattcaccttgatgatctcttaacggtgcccctgaatattggtagagtttaatagtatatttaattttcataagtaatttgtgcaggtttgccctacgtgttctataattttgaattctgttagtgtccacataagatccatcaaaaattaaatttaaatctaatagcctttggatttacgagagttgagatagcgtcttgctaaagaatagaacaagttatggattgaatgcttgaaattacagttcaggtaagctttacaagaatattatttattctgcactaactgcagcaagtagaagccttccacattagcataagataacatggtggctcccagaaagcatagtagtctgatcatactagttcaaactaaaagtctgaatgactttctggctgaaatttatcagctttcagagtagtacatgggatgcaagctattttttccctcccttctccaaagtcaccattgagtgaataatctgggttactggtcttggggaaaaaaaaaaaccaaaaaacaacccaggaaagattatggattcttgattccatgcaagtcctttgaaatatttttcagcaacttgagagatttaaataaatgtcagtccattaatttgatgttcttgattttatcagtataaatactgaataaaagataccaaaaaatgtttgtgaaacatttgaaagcacctaatattactttgttctgtgttctgaactgaattttagatgttttatctattttcagccgtgatacctatacattttttttaatgcagcttactttatgtttctttttctaaggagagctatgagacatggttcaaataaaaaatgagtagattctaatcccatagtttataatattgtattagcctatcatttagtaattaactgcttatattttttcagtcatagaaatgtgtggcatataaatagtatgaccatataatgttctatcaaactgggacactcttaagaaggaaaggtagtgctagtaataattacatcagaataccagtactgctgtcttggataaatgagaaaggatggtcaccctatataagatgtcacccagaactgatctttactccaagaattctcattaactctagctccctagcactgtcctttactttatttactttaatgatttatttgttgaatttttttctcttggcataaaatgtttgcaagcagactcgaactctgactgttcctgggctaatgttggtctaattgtctccagattgtatgttggctgattttctctctcctttaactccacccaatccttgtcctggtatttctcctatcagactttttttttttttttccaaagaatatttttggctgatagaacaaagccagttagcacagatgtgcagaaatcattactagagttcagatcacaaatatattttcaaaagcagttttggacttttctcatggactacagtgtttgtatttttctaagtatgcaggcatgatttttaaaataatgcgtatgtcatagatttataagaagaggtgttaagcagcctcctcttagaggcattcagatttatcaaacacaagacagatactttttttccttctcactcaatgcttcattttaggctgatccttttgtgtttgcattcattacctgtgcaccaacatgtctgttttattccaaacaacttaaacctacttaacccttacagccacaagagaggacattgagaatattcctggtgcaagttgcagggaagaatgttctatatatcctctgctattgtttcttttctctcgtgtgtggcataaatagctatctctaacttttaacttgaagttagccttccactctgccagagttatttctgttaaggggccagtgctttctgccatcttacttgccctttcctcagcatttggctgtgtgggtcatttgctccttgaaagactttccttttgtgttactatggttttttagtttcctttttttattggctgctgcttcacagtaatctttgtgggctctttttttacccaactctcaaggtttggaactgtaaactttttttattttctttctgcctaggtgactcatctataatttcatgcacagttcatatctatatgtcctgatgactctcaaatttatgttttcagtccagacttctcttctgagtctccagagtcacatatccaatagtctctttgacatctctgttttaacatttcaaacttaacatgtgcactgtggaactcagttcctctccctgttttacttccaaccaattttctacaactgtgttttttcctttccattgcttaagccagaaatcctgattcctgtctttcaacaagtgttgttgatactcttccccaaaattgtcttgaattggtccactcctctccgtctctgctgccacaaacctagtccatgccatcatcagttcttgccaggattgccatagctctttcctaatcagtgtctcagcttccccttttgcctccattgagtccatttttggtaccatggcaaggtatgaatgtaaattgaaatatatcacttctttatttgaaacacttttatgacttcttattacatttagtaattccttattatgacctggtcttttattatgaccttattatgattcctttccagcctcatcctgttccctctctacctccccacttgcttgcaactcttcagccagtggtctttttaaagttctttgagcccacctttcccccacctgcctcttttatgcctagaatgctcttaccccagtttctatagaggcggcgtcttctcatcatttaggccttgatgtaactaccatctccttctcggaccattttatctaaagtatatactaccattgcttttccatttcaaccatttgtttgtttctttcatagcacttactagagttcggattattttatgcatttattttcttctatttggtccatcttccccattaaggtctttggggacagaaactttgattctctcattccctactggattctcagcacctagcacaatacctggtgcacagttggtatgcagcaagtatttgttgaatgaataaatgaaaagtgtgagtctcactatgttcagttttatatgtttacatgttttcttttgagatattagcatatctagttttctaaatccagatcatcctatataaagaaattcaagagagatgcaagctttgttagtgagagagattaagattgcagactgaagagcataaataacagtaatatccccatctcaaattctaactttcaactccagttttgctccctacgtcacaccttggatatgaattcacatgatctacatcagtgcgatggctaggaaagtatatatttttgaagcaaatggagtaactagttaatgtcagtcactctgttgttttattagtgattcacattcttccatgatcccatagtttatattcggcttttcaactctttcacttttctcctgccaagcattttatgtctcaccctatccttaacatacacacacacacacacacacacacacacacccctacctgttttacagatactatccagttttatcatagaattgtgtctcaccctatccttaacacacacacacacacacacacacacacacacacacacacacccctacctgttttacagatactatccaattttattatcatagaattgtgaatgacccctaaactttagtctggtcacataataccacttgattttcgcctcaattaccccgttactgtgttactacctctgtaccagcagcattgtgcatgtcttaagctcattgaagatatgatgaaccatgtgttattgtatcgcttattccaaattaattgctcaataaatggtgattagacaaatgtgaattaccatcctgtctctgtagaaaatcagaaaatgacatttcatgtaaaataaggttttgtattttatactttatcttgcagtatattctgtttactatatttttgtttccatgaaaagttaacactaatgatgattttcttatagcaaacttcttaggaatttaagatacaaggaaacaaattttgtgcatccatgtttcagatatgatcattctgtttcaaatgacaaagccctgatggtgctaactgaagaaccattgctttacattcctccacctccttgtcagcccctaattaacacaacagagtctctcaggtgagtgttgtagattattgcagaaacatctgagttggttcccatgtttagttttggaacctagacaagtaattggtcaagttcactaagtgactgagagaatctctgaattatttgtggataactgtaggcatattagttgtccagtttctccaccaacctcatggagatggtgatgggtctattttatgtgatagttgcttacttaaatatgtcttctttaaaaactacagaatgaaattaatattaaaatttcatggtgttaggcttacagttggtaacattcatagcagaaagtacctttttcttccaattaggaagataataatttgtgggtatgtgattctggagatactttaccgttagtacacacttctttatcaatttttcccttgaatttttttttcctgtgattttggaccttacccttaaaacctcaaaaactacctcagattttttgtgatatgtagtaatcaactacagttaaacatagtttaacatcttcacagctgctgtaaaaagtaagcaaaataagggaagttatatatgagctatgcttttatttcgtgtgttgaaaaatttgaatttttttttaccccaggcaattgagttcattctttttcttctcccaaaagagcatgattttcaagaggttttaatgcatctatttgttgttaggggtcctatgacttgttaagttctctacaatgtgtctcaaatgtttgtgtttatatagcccaagaacagaaataggaaatactttttattttgttttgttttattttattttatttttagacagggtcttgctctgttgctcaggctggtgtgcagtggctggatcatagctcaccgcttccccaaactcccaggctcaagtgatcctcttgccttcgcctcctgagtagctgggactacaggcacatgccaccatgcccagttaattttttaaaaaaattttctgtagagacagggtctcactgtgttgcgcaggctgatctcaaactcctgggctcaagcagtcttcccaccccagcctcccaaagtgctaggattacaggtgtaagccactgtgcctggcaaggaaatactttttttggtggaaaaaccttagcatccagtgtttatatttgggaggtatttagctgtagttttctttgaagtttgaatgcatggttgacaggtttaccatgtaaaaatgcatgtcttattaaaaacaacgttaagtgtcaactttttcaaatcaaaaagcaatattgagtcatcaggcacttggaatgctctttggaacctacaaatgattagattcatttccacccacagggtgaaacatccatttctatgtttaattaatttctatgtttaattaattaaactatattttataggttaaatcatgaacttcgaggatgggttcatagacatgaagtagaaaggaccaagtcaagaagaatgacaaataatcaacagaaaacccgtattcttcaggtatgtttctgtttgtctttgaacaatagttggcgtatttgttggaaggcttctcccagctgggttactctcttccctagaaggttggtaaacttgagctttagcctcttcccactgtctcctgctgcttccgatgcagctatcattgccactgaagtcctcctcccaggttttatagcactagtttaggttttatagtattagtagttccctgatcaggcatcgtgctatttcttgctctcaccttcaaatttgctttcaagccaggagttcctatgcatggatatctatatcaaatgtctttgtcacaatggtataataaataatactgcttatctcctcttttcttagagcttttcaaaaagagaatgttaagacctggggcagtttggaaatgaagacatccatttctgaacttagacatttactactatggtttaatgacaggtcttacttagaatctgttaagtgggggttccatctcaatgttgtttgccacaaaacaccattaagtcattccgtcattcatcaaatatttgttgttagaatttagactagcaactggcatctgcaagttcccaataatgagccaaggactgttcttgatcctgaaataaagtaatgggtatgataaagtccctaccttaatggagcttacactctagtgcagagctaaacaataagcaaataaataaatacacaaatacactgaaaattagagctaagttctctaaagaaacacaaagcagcataggaggttagaatttgaattgagaaatgagtgactagactgagtggtcagggaaggcttctctgaagaagttccactttaagacaacattgttaaggtaattaatgctagctgttataacagccccaaaatctcagtagcttaatggaataaaattttttcacttgcacaaaatttgacttcactttctaggattgcttttctccaagcagggagtaagggatccaggttccttctattgtgtagccccaacaacttgaaattctttgcttcttgcttgagatgttagggaagaaagagtttggtggattgtgcaaaatgttttaagaatcaggcctggcttttagccaatgtttagttggctaaaactctgtcactttgcccaaactactgttagaaagactgggatcatgtatctttctgtgtgctcgagaagaagacaagggtttggtgagaacattgcttttgccataggcagaaaagtcactgaaataacaatgtaaagatttaggggaggctgggcgtggtggctcacgcctgtaatcccagcactttgggaagctgaggctggtggatcacgaggtcaggagatcaagaccatcctggctaacacagtgaaaccccatctctactaaaaaatacaaaaagttagccaggcgtggtggcgggtgcctgtagtcccagctacttgggaggctgaggcaggagaatggcatgaacttgggagacggagcttggagtgagccgagatcacgcagtccagcctgggtgacaaagcgagactccgtctaaaaaagaaaaaaaaaaagatttaggggaaaatctggagaaagagcttccagacagagggaacagcaaatgtaaagaccctcaggaaggaacatgaagaagctgagtacgactggaatgcaggggctgaggggagagtggtagatgagattggagaggcagcagatgtaggctcatagcaaacttcataggctttgatgagaactttgggtttcatcatgggtttgaggggatgccattgaaaggtttgagtaggggagtgacttgatatgatttatattttaaaaaattagtagttgctacataaagtggaccatggtggggagtatgactggaagtagggagacaagaagccattttagtgggctaggtgagagaaattgttgtggtccatactggtgtggtagtcgtgaaggtggcagaaagtacctggatgccaaatatattttgaaagtaaagctgatggaaattgttgatataatgataaatcctatgcttaggtactggatgattggtgataccatttactgagaccagtactggggaaggagcagttagaggtggaagtcaagaattttaagtatgttaagtttgttatggctattaggcattcaagtggagaagtcaagtggacaatcaaatatctgggtctggagtttaggagagaggttgaaactggaagtttaatttgtggtgctactagctagagagaaataaagaggaaagaaaacagagtgaggtaccaagttctgggccatctccaacattacaggttgaaagagaaagaggaaccagtacttgaaaaggaagaagagtagctggccagtaaaataggagaaattgtagggatagtggtgtcccaaaattcaagcaaagaaagtttttaaagaaggggatgtaacagttaattacaggggctaagagagctaagagatgctgattcagataaagagtgagaaattacttttggaattgaccatcagaacttgttagtgaccttcgtgaaagttctttcattggagtggtgatggcaaaagccaactgaagtggattcagggaagtaataatagagggggaagtgaagaaaattatttcagggtgatccctatacatgggaatagagaaatggagtagctacaggagtcaagaaagagttttatttttggatgggaaatatttcaccaggtttacatgtttacatgctaatggaaacatcttaaactatttaattatttcctgactaattggaagcagtatgtgttatgttctaaagtacattaaaaggataacaagaaacatgggtttttaaccattatggaactgttttcatacataaaatgagggctagtctaggtgagctcaaactctgacattctgaaattctgtaattatctactgtgtgcttctcttggcctctccaacttttttcacctactatagtaggcaactttattggttgttaatactaatagaggctgcagacagtcattaacaatgtcacatgtaccccaaagtcccaaagctgcttattggcattggtatgtggagcctagtacttcaaaaattcatgtctgccaaagcctacacgtcagctgctaccatggtcagaggaaaaatggaccctctctcccttctgctttccacatctgaagcaagtgcatcttattggcagaatctaaattatatccagagctctggtggcaaaatagtttgagcgatataggtttcaggcttccatcctttgctacacagaggaagagcacaggagtcaggaatagatcattgccagtaggtaatcccacacagctagtataattaacttaatgaaaaattagattaaaattcttgccctaaatgctttttttttggccttatcattagatggaacttgtcatgtttttctttcctagtcattaaatgaatagagcatttactgtggaaggggtgcttggtattctttattcttaaaggaattccaatgcaagaaaaagaattttgttttaattttactgtctttgttcatttggagatgtgtagtttaaagtcttatttcattctgtgctattttgggtacacttctttctgtagggagcttagatatgctcagaaatgtgagaatcttagctactatagaagggaatgatggggaagaatctgtatttgtcagtagtatttgtcagtagtaaagaagttcctggttagaggaaggagaagaattattctgcttttatgctgttgtcaatgccaaagcatatcaagattttaaaaaaattctgtttcttggtgtaaagagcctgtaactgctctcctttttcttttctcatttcaacctttttttcttccggttacctctttcagttgctaagagtatcccaaactcttataaaatattctgtaattttagtgaactgacatttctttgaaatatctgttgtatttaagcattatgtcttataaaatattctgtaattttagtgaactgatttctttgaaatatctgttgtatctaagcattatgtctttgatttgacttgtcctgtttcatagttctaccctcttcctagactttgagtttttagagaaggtaaaggggaaaattaatgaaatatctttcaaaatgaaggcaaaataaggacattttcacatagagaaaaccaagggaatttgtctccagaagacctgtgctataagaaatgctaaagatattttttaaaagacttgggtaaatgataccagatagaaccccagattagcaggaaggaagagcatcagaatgggcaaatatttgggtaaaaagaacaggactttttaaaaagaaactatatttatcttatgtgtgtgtatttaaatgtctttaaaagactattgtctttttaaagcaataataatggcaatttattatggggtttacagcttatatagaagtaaaatataagacaataagaacacaagggggggagggataaatggaataatactcttaataaaatttttatgttgttcgaataatatttcaagattgactgcagtaactgatatcaaagtataatctctagagcaactactaaaagctaacataaagaagtacagctagagccaggcacggtggcttgtgcctataatctcagctactagggaggctgtggcaggaagattgcttgagtccaggagtttgagaagctgcggtgagctgtgatcacatcattgctctcctgcctgggcaacaaagcaagaccctgtgtcttaaaaagaaaagaaaaaatatagctaaaaagacaatgtaagaaataaaaatggaatactaaaaaatatgcagttcagtgaaaagaagacaggaaaagagaaacacataaagaacaaatagaataaattaaaaatgcataccaagatggtagacttaaatccaaccatattagtagttaaattcagtgggctaaacacatcaattaaaaggaagaaattttcaaactagatttttttaaaaaggaaagatccaactatatattgtttataagaaataacactttaaatatgaagacactgacagatggaaaataaaggtgaaaaaggatgtatgccatgcaaacatgaagcattaaaaagctgacatggctatattaatcagaaaaagtagacttccaaacaaagattattctaagagacaacaaaagaaattttttattgataaaaggagcatacaaggaagataaaacaattctaaatgtctaggcccctaataacaaagcttcaacgtacacaaagcaaaaagtgacagaacttgagaaaaagatctacagcataactggagattttaacatcctctcatttctgtgtaaatgcctctcacatttttgtcaattatgatcttttgctaaacccatacagctgaaaatgcaaaagctcatgactagtttttcagaggttccttagttaattggtataaatcttggataggtaaacggaatatctgttttctgtttgcctgatatctctgtaacttggcttttcctaaggcctacccattgctttctgagactagggaaataagtctggcttctttcaaacttctttgctcatttcatatgggccaaagtagcactaatcatttaaaattcaccagttaatctgttcattttcaaccttatatttatcaactagctataatttagttttggttttatttactacttactggataactatgccagtaagtatagtattttattatttaactgtgttcttcttttcattttattggtgatttttttcatttgttgttaaacagagcatttattgaacacctacaatatacaagacccacattagatttttataaaatgagatccttgacttgttacagagccagaagtgggaacccctatattcatctctgcatattggttccatccaccaaacaaaattgtttccttttcttttctcccttaaacttctgtacatgcttctgttttagcgcttatcgcattgtattgttttcctatatctgtcttcccagttaaactgcgagcttcttaaaggcagaagtcaaatatttaattttgtagcttgggcacatgtaggtgctttgattactgaaagatggatatatggacacagtaatgaacaaatgattaaaaaattatttaaaccattgtttgacagggtaagattactttctaatgaaatagaacttggtaatatgcccttgaagtctgataccctgacaaaccgcttctgaaaatcagcttacataactaccagggagaataaaaaggcatagtgcaaagcaaatgctgtgtgaaagacaggtttccagtgtagcatatgtgggccactaatgggtgtagattgaactgttctcttgccaagagtcatcaataagaactctttaatgatggcttagttcatagatgtattttggcatgaagatctctgtgtttaactcagtaaacaataggatctagtttcattatggacttttcatacttcttaggaacttgtcattgggaagataattattttagacaagcagacattgttatatgttcagtaacacttatatagcttggtcataaaatttgtggtgcttggactagcttttgggctctttctttaaacttaatggaaagtgccttaaatgccttaatctccataagacacttctcccagactagaatggacctaaagagttctaatatctgtcagtgtttaattatttgaactgaatatgtcagaaatcttagcaatggaagtttaacaaatttaagtatagaatgaaccagtataggaagatttcatataattttgtgatacagtattaaactttttttttttttaatattccagggtgctctggaacagggctcaaattctcagctgatggctgttcaatacacagaaaccactagtagtatcaggtaagacagtgcagaagctcttggccaaggaatttaaaatagctggtattttaagaaagttgaaattcacacttccctttcaccttaaatttgttctcatctatgagttttatattagtcatatactctaagatatatatatatatgtatatatatatataacatactactgagcagttggaataaagccagataatttcaaaagttcaactctcccaaatcccttaaatacaaatttagtcagaatgctgttccatcataattttgatgaaaatcttgaatacccatagctttcttgcccttgatttgcatctgtttcatgaacctagggaagggaatgttattttttgagtgctctgtaccaggtgtcctgctgagtgttttacatgtattttatctttaaatccatgtaataactaaaagtttattttatatatagaaaaactggtcaaatcatttattttttttgtaattttcagagtcataagacctagtggtagactcagaattcagatcatagctgttttacttacaatgcatttttcactacacaataatacttaagattttgaaagatttcaaagagaatgctgtatctacaggtttaaatgtcttcaaagggaaatataatatgggaagcaatatggtgtcatggttaagatgctagctttatttgccctgttgggcagagttcaaattataactctacctcttactttgtgggctcaagcagattacatgcaattgaagttttctcatctacaaaatgctggctgcacagagttgatataatggttaaattagataatatatttagagcacttagcatggtacataagtgccccccaaaatggtaaatgataatgatgtgatgtcattgacaacagtatcactgaagtgaaatttgaggatctcagcttctatctgtagctctaccacacatttgcagttcacttatatgaatttaacatttacttagaatatactgtgtgccagtgttctaggcactgagaaaaaaatatagatagatagatagatagtaaaaatgaagtcaaaagctattttattcattatactaataactgagaattcctattaaatgacaatgagcagcatatcagcaatcatgaatgtttaaaatcctgagattgtattatcctgttgaaattgataattcaaatatgtttaaataataactaatcattctctgctaaccagaatatatcattcaattacatttattttaaaaatatatcaatttttggatgcatggttataatggcatggtatttcttcattagttaaaatgttttagtgaattacagccaattttcattatttgtggattccatatttgctaattcacctactaaaatctgctaaaatgtatttgtaacccctaatattagcagtgcttttgtcatcatttgcaaacatgcgtagatgctccctggtgaggttgaacaaggcagtgttctgccttttagtctcagctatataaacaaggtccttttcacagtccacatttttcatatttttgtgctttttgttggtaattttgctgtttgaaatggccccgaggcatattgctgaattgctgtctagtgttgctaagccgaagcgggctgtgatgtgctgtgtggagaaactacgtatgttagataagtttcattcaggcatgatttatagtgcagttggctgtgagttcaagttagtgaatgaataatatatgttaaagaaggtatctctaaacagaaacacataaataaggttatatatttatcacttaacagaaatattgtaaccagaggcttgcaggaacctaaccctgtatttcccccaggaggatggtttaggattcactaattcattgctggcagtgactttttagaacataactatcacaaaatagcaagaagcgactatatattcaaaatattgtaatcagaaatggcctagtgaacaaatggagttatttcaaaggaaattcttatgactcatttattacttccatttaggtcagtctttttctcctcttaataatatttgattgatacatacaagttttctctttgaggaaaaatgaagcatttttacaggatccctttaactcttccagatattggtcctaaaccctagaaaatcctgaacacattaagaactctattagaatcatttgactgtattttttggggcatgatgtggtttgaggtattatcattttagtttttaattttagtaaggcacatacatggtacttttaatatcaatgactagcagttgttgagtgactcctatgggacaggatccatgcttggcacttgacatataacatctccagtaacagtcctacaagggttgtgtggttatactctttttattgaggaggaaacagtttgttcatggagggcaatttccccaggagtgcccacttgagaagtgaagcaggaattctaaaccaagtctgcttgttttcaagtcctaagctttttccacctttttgcacagcctcgtaggcaagcataccttcatatattcgacagggtggtgaaaaatgacttttcctcagatttaatttgtattactaaaaaaattaaaaatcgttcaaacctatgcagaaatctctctattttctgatactttcattatttttacatgctttgcaatgtacttgaccatctagtacattttagagccttgattcagaaatcagaattttagcataagtgaatgggttcttataaaatatcctgatccttgggctttgcaaaatattgttataaaaattactgccaaagtgcaactaatattttggttgagagagattcttagaattcagacatagccttagaatgggaagtattttgggaaaacaggaaactttttattttagtaataccttatatttttcttactttagcaggaactcagggagtgagctacaagtgtattatgcttcacccagaagttatcaagacttttttgaagccatccgcagaaggggagacacattttatgttgtgtcatttcgaagggtaagttcatcttgaaagaatagagcaaatatttttgagtgcttgccgtacacaagacattgggctgaatattgtggaaaatacaaagatgtgagaaataggaagcaatataaaataaattatgtgagtggaacagtctaagtactgtaatatatgctttactttgagctgttgagtattataaagatgaacatggaattggtgtcagactatgagtttgtatttaggaaatataaactacttgttgatttttattgtttgtaatcctgatagccatgctgtttataaaaaaaggaaaagtaaaaacataaaaatattctatttaggcttttcctatttaggcttttaaaccaattcccatttggttattgagaaacagacttctgaaatgtaggtttgagatggatcatgggctgattattaattgtggaatgtttggatctatgttcctaagaatctctattcctcttttatctcttcttaattaaacatttggttggtgaagaatgtgttagataatcagttagcttatgtaaaagtaaatgtttatactagcacttttgaatgttatgaatgttaggctaaatggaaaaaatgcatagctgtttatatttcatctactttttctataaaatgaaaatattttcttcatagaattgccatgtgaatatctctgttagagtgctgtaggttaacccaggagcacatgaatgaattagaattcctcagtggtggtttctatcccaagctgttttttctttctttctctctgtttttaaacaagagaagggacctcactgtgttgcccaggctggactcaaacccctgggctcaagtgatactgagtagctggctttcttttttttttttaagaatacactgggtatggttagaagtaagtacagttgacccttgaacaacacaagtttgaatgaagcaggtccatttatatgtggatttttctcaaccttagcaggatgccaaacccacttatatgcagggccaacttttcacacatgtagattccacagagctaactgtgggacttgagtatgtacagatttggagttatacaggcggctctgtaaccagtcctccacatatacagagggatgagtgtctatactaacaatagaatgagcaaattcattctctgattattaccactcactgtcactgaaattctcagttaactagttaattcttttcctaaggtataaatatctagcagctcaggtttttaggaccagagaactttgatacttgaaaactagggagatcaaacatcttatatattttcagttattaatcaaacatgctaagagatttggaacactttagccatagcgtctcatgatcactgccttttcacaaaattccctgtgttcaccttactctatcagacataactggtatgtttctgtacaggaccagcctcaaagtttcttttcagcagcaagggggcagctgagaacaatgtttcctgcaaggctccaactgtactggtctatgaaaacaaagtatttcccttactattgacacaattatgttcaaagtaggagaaaaaaagtaaacttttaagaagattcagtactatgaagaagaaacctgctgggtgttaaaatgattgtgttgaagtatattttatggaagttactgtaggagaatgtttttaacactcaaatagacagtttttctgaggttcaggataattactgtattatttgatcaaaacagtataacagatattagaagtaacacttgtcaagccatggattgaagtcatggttagtaatgtttttctaagggaagagaacaagtattttttatagagaagacaatcctagcttttttttttttcttttgagatggattctctctctgttgcccaggctggagtgcagtggtgccatcttggcttactacaacctccacctcccaggttcaagtgattctcttgcctcagcctcctgaatagctgggactatagccgcatgccaccatgcctggctaatttttgtgtttttagtagagacggggtttcaccatgttggccaggatggtctccatctcctgaccttgtgatccacccgcctcggcctcccagagtgctggaattacaggcatgagccaccgcgcccaaccaatcctagctttaaacagactgtatttttataaaagacagtgaatggcggtttaaaaaatatatatgcattgcatttttttgcatttgtaaaaagtgatttctcattagtttgctataaaagtgctgttagaaaattattgatttccactcctccctagtcccttgatgttcattcaggaagactgttaggactggctctcacacaattactattaggagtatgtctaacattctgtttcgatttttcattttcaaattactgatttatcacattttggtgttttatatcaaggaagagtaaagacaaatgaactgaattagataatagtaattaagataacatcctttttattttttttgttttgtttcaatagtagggaaaaggaagttaattttatcttgatgactgtaaactatgttatgggacaggaattttgttctttaatacctggattgttctttttgctcttgctgaaatgaaaatgaaataataaattacctcatgcttggtcttctttcatctttcaatataaaatattctaacagtttcattaaaaaggtgagtggcatcatttcttgtgcagaaggatgtagactttttctcccacttaggttcttaattttattggcagaaattattataattgatactacattggaaattcagaagaagattccagagccccaggtttcggcttagcatgaaccagacatttataacaaagccaataagcaagctatgttattttattttatgaatggacatgtatttaacaaaatattttaatatctaaagatgtagaagtagccattgactgtttcgtactgttatttaagccactctctcccaaacttacactccctcacaccctgcattcctgtaccttttaatctctttacagttgagcggttgaaattattttctctaaagcagacacactcttggataactactgagttcctgttatagctcagcaagaaaaaatgcttatgatcccagtactccagacaaaggtccaaagtgcttctgttcttttgactctccttaaagagtttttaccaccaacatagtaatctattcggctttctttgcttagttccagttatttgtagcttattttcctgtaaatactttgcctttttctcctctctttgatttgtttgttttagtatgatttggagagggaggttggagaataactttttctcaaacttccaagtcactttgagtgtagaataactgatacattaataagaaaaaaatccaattaagtttaatgccttttttgtttgtttgtttgtttgttttaagagacaaggtctctgttgcccaggatggagtgcagtggtacaattatagttcacttcagcctccaactcctgagctcaaacagttctcctgtgtcagtctccagagtatctgggactacaggagagtgccaccacatccagctaatttttatttattttttgtagagatggggtctcactttgttgcccaggcttgtcttgaactcctggactcaataatgcttattttaaaaatacttttgtggccaggcgcggtgactcacgcctgtaatcccagcacgttgggaggccgaggcgggtggatcacgaggtcaggagattgagaccatcctggctaacacggtgaaaccccgtctctactaaaaatacaaaaaaattagccgggcgtggtggtgggcacctgtagtcccagctactcaggaggctgaggcgggagaatggcgtgaacctgggagacggagcttgcagtgagccgagatcgcgccactgcactccagcctgggtgacagagtgagactccatctcaaaaaaaaaatgcttttgtatgatagtctatttagggagggagggaggaggttgattaaataatataacaaaattaattcaagagctaagacagaaacaaatactcaggaaagctcaaataaagttaagaagaagatgattttaaaagggcagaaaagaaacattgagaagaaagattgggaaatgatattaatttattatttcaatacacatttaaataccatccttacatgtagctgtctcatccactaatatataaggaaagaatttcttcctggggcagtttttcattaaaaacaggttctctttgaatcagatggctgtgaatgtcagtttgccatattatctctacttgtttaatatttttcttttgcaaatgagatggatgcctactttgggaacattttttatttctattacattttctgttttcagtacctgtctcaaattgtaagtaaacacgtaaagtgtcttttcatcagtttcaaatacatacataatattacagaagaatctgagctatagccatatgactgcctgagagatgtctctttctcctctctttccaagtattttatatattctagcaatagtaccatatttgggtatgcaccccttactggtcccttataaaaattattaacactgtcatatatacggcatggattataagggtagccttaagtaatagggacttattgtaagttatgtgagattaaagaagcacaggaaactggctcagaatccaaataatccctctgtgcttgtgcttcattgggtggaatgtatactagtcttcatggagaattggaatagtggtttattgtcatttctgatttgacagcagctccagtgattccactttagtcttttttttacactttactgattcatactcctcaaacacaaagatctgattgggtagttctggtcaccatctcttacgcagagaattactatggcagctttggcttatgatccacagttattcatttgtgacaagagaaaaacctggggccactcttctgagaaaatgactttggcaggcactgggagcttcataaactactataccacacagcctgttttttttaattattattcttttttccccgttcttagtaagtgtgcattaaattctttcttgtattggttcctaattgtttgatctaaaaggcccatcttctcatctatatgataagccttttgaaggcaggaaatatcgtatgcttttgtgactacccctgacactcagcaatgcctaccactgagtgcttactgaacagaatggttttagacatgagccattgagagaagtcacagtgatggaagtttgttgtttttcataatcatttaaaaggtttttttttttacattgttttgcttaaagaaattggaatctattttactgatctaagaagtaatataagctgtgctgaatgccagtagaaagtttagttaaagatgatctctgttttgtccatttatgatttgcactagccagatatcatcagcttattcttgtctctgaatctaagctgtagagctaaataattcacctgagtgtagtgtttaacagctttctatgtcagtaagtagaactttgagatacttgcatcttcatttaaaattatttgttggcagcattttggagtagattgttgttagacctcactgatttcttttttggagaagggatgggttctactatttgtacagattcaagcagtaggagccagaaacttgaaactttggaaacactgtaggaaatactgtgattattgcaaaaaaaaaggttgactagtggtgttatttgttcaaaatgtttgccagaggtttagtcccacggatgggcataaaaacgaatttcaaaaatagcaatgatattttctaacttaatacctagattaatacctaacacatgaagaatggcatattttcttaatgcctgttatttatttcttagaaatttatgtttagtttatatgcatatataaaaattcaacatatgtatatatataaaaattcaattgtatgtatatatataaaatcttcagaggcaggaggaatttctttagtatcaaaggaaattcatttataaagtctacttcaaaagggtacagctccttcttttgtttctgagacctcaaaacttgagtgtacacatagatgttggagtttggccattttcttatctccactttcatggcctttgagccaaattctagctggaaaaaaaagtgaatagatgagtttggaaagatacttgcattttagaaaagggtcttatctcagaagagagatgttttaaaaaaccttcttttagaaggctttttaaaattaatttttagctttaaaatatattctcattcaggtctaaagcacattataaaaaaatagagcagagttgactgagtaccctaggttaataaacttaacctagatttatttaatcattatgccaataatgttctttttatatgtccattttctatttcactttattatatacaaatattaacacttcaatgtatactacctttgtagtttacaaacctctttcacatacataatcttagcaattccttacatataatcacaagtattcttagtcctattttatggctgaaaaagctgaagcaaagagagattaagtagcttatctaaggacacaaaaatggtaagcattagaactagggcaataattgatagattctaatttaatacagtgatttttttttctttacattgttgtgcttttttctttatatctggcacttttagatgtattacagcatatgtaaataaattaatctaaccctccaaaatcaagatatttcattgaaaaatctgctggacagttttggcagattcattacacaacttcaaaaattgtttgtttgttaattacctgattatgtttgtttgttaattacctgttaattataattatagattaagtactttaatagattatgctttcataatgctggagaataacttaatggtttgaaatattatagtatagcttcagatttcaagtcagggaatagaataaataggccttgaaagtttctggtttctttttaaaacagtgtctgaaatttccaacatggtggaaaagaaatgtctttgctttgtcttaaaaaggaagtagtttagcaaaaacagaagctgttttaattattggtattctagagcttctcatagaaaagagtggggtttttgtgtgtgtaaatacattttattatggattctgtatatggcgtgctagatctttgagatcagaagcatttgatctcaaactccttgttaaatgtgagttactgttgtgtggttttagaggattcaactatttgttctttgtctctataacattgctagctaacataaaaacatgttttttacttacacttttcaatcacaaagtctaaaataacttgctttatgtttgagaaaagattgttcagtagtctgtaagtagacttgtatatagccacaaacagagaacttataactcaagaataatacgaagtcttcaaaattctcagaatggtgggcagatccatctgagtcatgataatttttcaatggttcttatttgtttgctctatttggtagtcttattattatgaaatgtgtttttcatatgcatttgtttaatctccccttttcaggttgtatgctttctctgtgcagggataaagtctattcattctgttttgtcttttacaagatctattgcaatgcattgcaggctcggcagagtaagtcctaaataaatgttgactactcagaccactaactgtttatttgtgttgtttacccttattttttatgtcctactcttcaaaagattactagaggtggggtttgcagaaacaaaggaggacatttttctcaatgaatgtttaaaattacttcggtgacttggatagcaatgaaatttttaagaatatatagtcagctttggtgtgggtggactttttgctgtggaatagaataattcctgaaagacttctaaagttactttgaaaaaaggcaggaattagggtgggaggtgggagaggagcagaaaaaataactattgagtaaccaggcttactatctgggtgaccaaataatccatacaacaaacccccgtgacatgagtttacctataaaacaaacatgcacatgtacccctgaacttaaaataaaagttaaaaaagaagaaaggtaggatttaatgattgatagcttaaagttctcatcaaattttttgtaatgagggaagaaaatatttccccaaagcagaactgcattcccagaaagaacatttcttcacatcatgaatatgtgaggaaaaaatgtattttaaacaactgataggtacagaccctaggaacctgcattctagccccaatgttgccactcagtgacatctgctatgtgactttagacaaatcacttagtccctctcatcttcagtttccttatatgttaagtgataaagttaatgtagatttgcttttttccttctggctccagaaatctatagtttttatctgtgtgtttgtgtgtgtgtgtgctttcctcttagaaagctgtagtattgctttaaactctttgaagttactaagtgattcaatctagtggagtcagtgtattttaagagttttgaaaaacagccataacaaaaacaacaaaatgtgaagttacaaggtggggctataaattaatgagtttgttttttgaatagctggcagttttgtaatttatttaataacacttatacagaacacaatacgataatctttaatctttataattgagataggtgcagttatcatcattttacagatgaagaacctgaggcagtcgtgtccattgtgaactccaataagaaagattaaaaagaaggaagaaaaagtccgctgtagaaatgaaaaaacaaatttatccattgtgacatcgtttagaaatagcagtcagaatttaaccaagaaagtctggctctatgttcttgatcatttccctctattgcctgtttaagatatccaaatatcatatctttgaaggtagtcaacttggagtttaattccgttgatctctcttttcaaaacatattttgagttgtttcgggatcattttccagagactaagacaaagccctgtggaaaaccaagccacatgttactcaaagtaatagtgtaggaggaacaagagccagcagggaaacacagaggaaattattagaaatataggagaattggaagagtacagatgaaggaaaataaatcaacttgtttatgttattttaaaacctagaggtcaaggaagagttcagaaaacgaggctgtcagtggtatcagatgttatagcgctccctaagaatgagaaatgaaagaaactcatttgtcttgtgtaaacattaaaatcattggtaacttgagattacatttattgtagagtaatcagaacagaatccagaaaagagatagaagagaatgggaaagaaaaacaatggtttggtaaatctgacactggaaggaaatggagatagcctagatatagataaggagaagagaactaagagtgtgtatgtatgtgtttgtgttaaggacaggagagatatagggatagggtataaggtaaataaggactattgtagttagtttatatacatataagaatagagtttatgttttatgcttgacagatgttctaaaggaaaataaacaagtcattgttcctcctctgtattgttttctgtttaaagtaaaagcatggagaaagttgaacagtttttgtttatttgcagtaggactacagaaaagaaaaataaaagagcgtatggaattaaaaccagatttttgaaaaatcaaatcatatttaaagtactgcttgagatatcaaaagtcttttaaatcttaaatacagagctggtttttaataatggtaaagagttttcaaaatgttaaagtttatagaactatttctcatttaattatatgtaaatggttttataattttttctcacattaagttagaaaactagcaaagtaacctacataaaatttggtataacctttcttatgatgtcacaaaacttaattatggaggaagcaattattataattaggaaaaattgatgacttatgatctgactcaggatcaaggtctgaaacactcatgtcatttcctcccctctcctatatagtatacagtgatttgttcattttggactcttaatattttaacttttgacaccatcagcaaatctaaacactgacagttggtgttttcctgaaaaatgttaaggctaataattgtgtgatatttatttcaacacattgctgctagtcttctataaagatctcattatgggtaggctttgaagagatatccagttcataatatgggcatcacactggaagcctgcaagatggatgattggctgagagtaggagtgtagtttctaaataataataagtctgtttcccctgctaggaagtaccctgagggcaggaaccctctatcttagtcatgactttgttcccaatacatggtatatcaggcatgtagcaggtattcaataaacattgaatgaataaatgaacaaattaattagataccaaatccatcagtttgacactatattctaaattagtttatatagtcaccgtaatgtgataaagaaattgtgatagtctagtttactgagcattgttatcaggaccatctgtgtctcatgtttaagtctagaaatcagtctttgaaaatgagtgaattcaaatgcatttttaaaagtctaagtgccattttgcatgagggaaattatatacctagtaagaatttctctgggtttcaaagtcagaacactgatcttggtaatacatggacagaaaggattatttttcagttagggtgttaaacagattgtgctatcattttaacctctggaatgaataagccccagatttaataagctccttatgtataagatgcctgttataatgtgtctgtaatgtcctagaaagatgagactacccctgcatagtgcttatttcttgcatggaatgaatttaagataagcttgtcaaattttaaatctgacatagactatcttttgaataatttatttggagtcatctctgtctgattataatatgccctaaaataaatcttgaaaaattaaaatatatcatacagaataaacagtctacatgtaacagttaacagttacatgtaaagtgttattcagattacattttacaactatttcttttctgattccattttttattgaatagaagttcaataaattttattctgttaagaatgagtctgtcttggagagggtcagtgtcacatatttactttgaagttccttaaagaggttagttgaattctccccccaaaatgtgctttgaattagcagcttttgaatatctattctagtagaggtaggagcaatatgaactagagagaatgatatgcaataaaaataataatttttctttgactttggaatgaggataatctaaaccacagccatgtaggcagacattttctgatgtatgtaggtatgtttgcatgtctgtctatctatccatctccttgttttctatatatttgaccctaacctttcaggctcctattttgccatcaggtccaaaaccaaactgagcgataagagagtggagatccttaaatcagtggttctcaaactttttggtttccacattcctttatgttttcaaagaaacattaatgagaagagtagcattttgttaacattaagaaaaacctctttaataactggcttaatagaaaccagctggattcttatatctgttctttttggtcaaaatatatgaagaaaatccagcctcacacagagatgtaattggaaaggaaggactattttaaaagcctttcagataattgtgggtattctttgatgctacaccaaaatgcaacaagaggtagtttcttaaaggttagttgcaacacggaagccaaatctgtgaacttttagtactctgaaattaaaatccattggttgatcttgcactttgaatggatcttttacctgtgcaaggttttgttacatcatacattggtcatttgaaaatactggttcactgagttatgcagatcttccaaatgttgacacattttattatgtattaaaatgtcacattctttaatactatcacaaatcttatcagaaaagtctttaaatattgtgagcagttcatggtagcagatagaagttttccaaaattctagttttcacttgagggttcaaattttatcattgtcaaaaatatgtcagttttccttgaagtggtagattcactaatttattttcaagaacatatctgtcagatacccaaggctaaacaactataatttatcagtctttcaagtaaaagtggtgttccatgaagaaagtagctagtgcagctcacaactcagttacacaagtggttttcctctagacaacaattgtactttgatatgcagcagaaatgctttatgtgtatttcccattttgtcgtacagaatattaaaaagacttctactcaagggtcaagatttcataaaattaataacttttattgcttcatcaaagacttccttcaattacattgactgtgtgtggtatgtgcatgtatatgaacatagggcagtaatatgatgaactatataatacagtttgatgttgctgtcttaattcatgctagggcaccatcattgcttttgcatcatcagtgtaaatatcaacacagttgtttcaagataaatgatgagatttaagaaagttattcaacactgaatatttcagtactgttagtgtttgttgccaagcattcctataaaaggtctttgttgttgattacttggggctcatactgaataaatctaagcaaaacataaagtttatagattcttccatttgtaaaacaaaagcacaattctgtagttgagatattaactcagccttcgtatttgcaactaagtgtaatttgatgaattaacatatggttggaaagtgtcatgatttcttatactgacttttcagcaggcattgagcaaggtcgattatccacaattttattagtctctcagctattatatgcactttttcagtcattgcattatattaataacttacaatgtaggatacttccgtggtcttttcatttccagtatgataagctgtaatagaatttttttttagaggattcttcacacctgtgtttaaaatatccagttccattttctttgaactctacatgattggtttcagaatgacatcacaacttaattggcaccattatagtatttgaaagattttgttgcataagcgacaagaagatagattattcatatgtctgaaacaagagaaagatggctttcaatgtatggtcattttttattaacaattttgaccagtttctttgctagattccacctttccgtgagtcataaaattctcaaatatatcagttttatcttttctgtatcttatatgtagacagtatagttgtgggttaaggaggcaagttttctaatctcctgtcttttaagccagcaattcattcttaaatataagaaaagtatgtaatagatttttatatgaaatattaaaatttaagaagctgtagatagatttagaaaacttttccaaaaagatttaaaaataatattataaaacaaaacaaagtatacattcttctttgttgtatttagatagaagtttcagtagtggagtccatataactaagctccataataatgtgtttcataactttctccattattctactactagatcatagaaggcttgtttctcttaaggtttagttttttcatgcactcagaaaatagtttttcaggaagtatgtactgagtattctgaggatatgcaaggagcatgggttccagtgataaataatacatagtctctgtgctcagggaacttatagtttagttggtgctaaccagataaattagcaaaataattgacagatatagtaagcatgatgaaaacacacaatggactcagagaataacaaggatgctctcctgagacagcgacatttagctgatatctcaaacatggggggaattcaaggattccaggcagaggaaagagcatatgaaggcagttaagtaaggcaggaaagagctttatttgaggcactgaaagaaaaccaatgtgacaggagactagtgaatgggaagggggatgagtaatgaaaatgaggtttgggagattggaaggggctagttctacaaagccttatgagctatagtaagtagtttgggttttattctgagggccagcaaagggatttaagcagcagaataacacgaatgatttagttcgtagaagatgttcactgctacatggacaatgcattagagagagacctattaacagtaggagcagagagagcagagataccaattagaaggctttttcagtagctccggcaaaatgatgatggcagcaaagtgatgaatggattctaaatacattttgtggatagatttagtgagaattggagagatattagatgtgttcagatttctgtcttgaattactaggtagaaaggactatcattttttactaagatgaaaatatttggggggcacggtaatatgtttggtataaatgtggagagttatttttggatacatttaaatttgaaatgtctgtgagacattcaagggaatgtgtgcaattggctctgtgaatctgggactcaagagaggatagatctgagctaagaagagtaattaagaattgtcagctcatacacatttatttatttatttggagacgagtcttattccatctcccaggctggagtgcaatggtgtgatctcagccccctgcaacctctgcctcctgggttcagatgatcctcctgcctcagcctcctgagaagctgggattacaagtgtttgccaccacacctgactaatttttgtatgttttagtagagatagggtttcaccatgttggccaagctggtcttgaactcccaacctcaagtgatccacccacctcagcctcccaaagtgttgtgattataggcatgagccatcacacccggtcagcttacacacattatctcatggatttacatgggaataatggagtcatcaagaagagagtatatagagagaggagggttcaggaccaaattagattttgaattggagaaggatgagagcagcaaaggacggttcaggaccaaattagattttgaattggagaaggatgagagcagcaaaggaggagggttcaggaccaaattagattttgaattggagaaggatgagagcagcaaaggagactaaataggagcggtcagcaaatagggagaaaaccaagagaagagacttttgaatggggaaggagtggtttattcttgaatactgttgagacgttagataagatgaaggattggttttcactggatatgtcaacatgaaagtcactgatacacttgacaagagccttttagtgatgacatgaaacataaaagttaaagatggattaagtagtaaggaagtgagaacagcataactatttaaaaatgtttgcctataaaagaaaatagagaaaaggtagggttttgtcttattttcaaactctagatatcaattatatattttaaaggaatgaacccatagataggaagaaagcaatgttaaaagagaagtcgagtccttgagaaggggcaaaagggtggaattcagataacaggtggaaggatggccctttgctagtaaggcaggacattatggtagaggcaagatgagttcatagataggaccttaggttccaggaagataaagagaagacacttctaacagtttctgttttcccagtgaaggacatctcaactgatgtcatcagctgaaagtaaggatattagaggaggtgtagaagatttaagcagagaggcacaagtatgaagtagttgtcttggccagtgggatagtgagcctactagagacatttggattgtgaggccttggtggggtgtcagtatgccgtatgctttaaagtcaaatctctgcaacagaatgccaggtgtagagttacagttgattaataagacacagcccctgtactcaaggagtttgtaatctagagaatgaaagacatataattacaatatggtgtgatggttgtgatgaacaaggtaaatatagggtgtcataagagcacacattaaccaatcttggaggggctgtcctatgcaaggaggtcttcatggagacctaacagctaagctaagacctgcctgttctgcaagtaccttacttaaagctattacataatagctgctggggatgaaaatattctagaaggtatgatagtcacactgtattattatatctttatgcagtagcttttatttctgctgacatcatcaggcatctttgaaatttcttttttttttaacacttcgaaatgctgtgaagcaaagtatcatccctctctttcctcaccctcttctcttccttaacacctttcttcagttctagctgttggcagctagatgcaacttaataatgccattttgttttcatttggcatgtcattcatcattttcaaaataaataaactttaattttgtgctgccacaatcaggaatatttgaacatttagtgcttatcttgggtatctgcccttattactttctgaggagctgccctttatagcaatcagggaactataccacttggaagactaattgtctttatacaaaaataaaatccttgtgttcagatttctgtcttgagtggctggtttgaatctaattttctgttatatgaagcaaagatttattatttaacatagtttcaaaattaaaattgatagtgaaattttatgtgccatgcaatgtcatgtgtgttcttttaaggtgaagattcattttttaatagctttattgaggtataattgacatataataaactgcacatatttaacaccacattttatgtgtgatatgtatgtgtgtgtgtgtgtgtgtgtgtatatatgtatatacttatataggtgaaatcatcaccatagtcaaaataatcagcatccccatcagtcccaaaagttttgtttctcatgcccctttgtaatttttccctgccctctcaccagtcaactgatctttctgttactacaaattagtttatagttttaaaaattgtatataaagggatcttaattatatatattttccttccagcagaattattttgagattaatccatggtgttgcttgtatcagtagttcgtctttactgctaatattctggtgtagggatatagcacaatttactaatatattcaccttctactgttagctactacaaacaaagcaactgtgactatttgtgtacaagtctttgtagggacaaatgcactcacttcccttgtgtaaatacctaggagtgggatggctgggttatatagtaggcatatgtttagctttttaagaaactaccaaactactttggtacaagtggttgtaccattttacattcccaccagtgggaataagagttgcagtgcctccatatccttggcaacacttgatacagcctatctttttatttttagccattctaatagaggtatgtagtggtatctcattgtggttttaatttgcatttccctaataactatattaattttgaccaactttttatgtgcttatttgccatccataaatcttctttggtgaagggtctgttcaaatctttcccgattttttattgagttattttctaatgattgagatttcattttgaggattttgtgtgtgtgttgttttgtttagcagcttagaacacacacatttattatctcacagttactatgggtcaggagtccaggcatagatttgctgggtcttctactccagggtttcatctgaaagtaacaatcacagtcttggccagggctgcagttgcatctcaaggttttactggggaaggttccactcataagttcacatgattgttggtagaattcagctcctcgtgggatgccgaactaagggtctcagttatttgctcagttggagattcccctcagttcctgccacatgggcctcttgatatggcagctcacaacatgacaacttgcttcatgaaagccagcatggaagtgtttatgtttactggtttattatgattaacaaaggatacagatgaatagcccgatggaagagatgcatagggcaagctatgtggaaggggtatggagcttccataccctctccaagtaggctaccttccaggcacctcctcatgttcagcaatctggaagctttgcgagttctttatgtattctatatacaagtcctttatcaaatacatgacttgtaaatattttctcccagttttttgcttgtatttaaatttcctttttagtgtttttcaaagggcagaaattcttaattttgatgaagtccaatatgtcagctttttattttatggactgtgtttttatggttttaagaaatatttgcctaactaaaggtcacaaatattttctcatattttttttcttaaagtcttacaattttaggttttacatttaggtgtatgatccattttgaattaatttctgtatatgtgcaaggtgtatatcaaagttcattttgtgtgtgtggatatccagtattgtatgatattcaatgctgtgttttcacctaatagcttttaaaggaagaattaaagcaaagccaagttaaataggttataccagactgttagttttctttgtgttatccttgactttgttaggttgcacattttgctggaacttcttaaaacagtatcctatgattgaacttcttcaacctcaaatttccagtctttatacttaaccaatgaaatgttatttatatactctttggaaacataacatatactgtagataattataacaaaagtgtaatgggtagcagaagatattgccaaaccaaaattctggagaccagatgagacaaacacataatatgtgcctgtatgggtcacagtgctaggaaatacactgaaaagtgaacaaagaactaaaaataagcctcttataagaaaagctgctacttctgggctaatctattagtagtttgttttccttaatttgaaaaagagcttcagaatcagactctagagtgaatcttttaaaactatatatattatgcatgtatacacatatacatactctatgcattggcttagataatataaaaacagcacaggaatagtttatgctgtagtattgtgcagtcttattcagaaataagaaaaatagtttttccatttagctgtgagtcattactttttagtttcgtggagaaattaagttttagtgggggtcgatacagcttttttttttttgtagaaaatcaggtagcatgggctttggagtcagacaaatctcggttttaattttcagtgtccttatctctaatatagtaatattaatagttacctcttcctgggttgttgagaggtttaaatgaaataataagttaagtactggcacagtgcttaacacataataggtattcaagatatgtatacttctttatcatcaggggattgaccttggaagcatatgggtacatagaaagaacccataaaaggatatgacaaggggagaggagtttgttttcattagatttagcaaattcattctttcccccaactccccagaaaaattcattttaatgctattattttccttatcacccataaacagacagaaaattggcatgtttcgaaagagtgttaaaactgcaagagtattacatggtatcattacactaccatccattatctaactgggtttatttatgaaggttagatttagataatttagacttaccctttttccattttgtggggaaagagaatcagaaacttgaaaggaagagctcttccaaacagaaagatagctagaatctctctcaatagtctatataatctcttctaataatctttagcaaaagtgacttttgagttcttttaaatatttcctgtattgattctaattcagtgctcatttcatgtgatgtctatagaactacagacttagattacagtcagaaaactgagtaacagcagacaccaggttttcagctgtttttagggtttattcagattgactacatcacattcatttggatggatttagtgacatcaattgataattgtaaagaaactagcctttaatctgacattttcatattgatattagataggagccacatgactatgtcatgggttcattcacaagatataataaacattattttcacttgtagcataaaagcagtctttagtgttatcttagaagcattaaaacacacacatatataaaatcatatagattaaaaaattctatcagcataggttctgtaattgttaatagatgtaattgcataaggtcgctatgcattatttctcattttcagatgaagcctgtcaccttgacatttttatatataataggaatccacaggttgttaaaaacataaggaaattaagataatttgaattcagattataaaatagttcaggtctattctgatgaagcaatgtcacttaggtctgaggcttttgggtcagcttttaaaagtttatcttatttttcattaaaatatgtatgtataatactctatcatgcaaagagaaatggtcaacagaatttctgtgcatatatggttgctggttatttgaaagccattctcctcctaggattatttgaccaattttgtattcagcttagattagggagaatatagtgtctccttaggtaaaatacttactagaaccaaaaagtccagattaaattgtttttatttttattttactgcagttttgtgcagttgacctgattttaaaatataaaactaggaaggcatatttttcatctaccaaaatgtgaatcttactttcattttgaaacaaacacctctgctttaagaagatgaacggtagtgataaatacaaaaacgttaaaattttttaaatgaatagcgtttgttgatctttaaagaaaacataaatgtgaaataactttagagcttaaaagttttcttcctcaaaccttttaggaattgattttattatccaaaacaactttattcatactaagtgtgactatctgaataattaccttacttttatagttttttttttaaaaaagctcttctaactgtaattatcctcaaagaattggattaagaaattcaataattttctgtcattagtccagcgagatatttactgaatagccattacgttcctggctgttaacactacaaggactccagcaatgagcaaagcaaacaagcccttgcttttccagagcccacattctagagtcagatgctaaacaaatacacagatacatatataataaaatattggtttaagtgttgaaaagcaaaatcagagtaagaaggcaggtagtcattttaaattaacattgagaaatgtttccattttaagcatataaattctttggcttctctttttaaatttgcttttgactgtttgttgctggcgaaaattatttaaagtaattaggaactcatcgtaaatattttgtacactactctaaaaatctaattccaactagtgaatttagcatttataaatggaggtgtctatagaggaataaaatctttggttaaccactactttacttttagcagtaaagtctgcagctcatgaaatttgtaattctggagtggtttcagtttgcaccatcccctggggagcctgttgatacagcactgagctacagattattattcagctgtagaagttttatgcttaggcattttcttacatcttcttctctcagtcagttgaaatcttgtatttttgccaaataaaacaaatcctatattaataagaagctataaataaacagtaggagcatgagtcagagccagcatcaccccattccttgtgtgtacctctctagtactccccagtatgttccttttgcacaaacatgtagtactgcgtaactactgttctacagatgaactccagttatttaagtgaggcctgttttttagaactaagtaatactgtaactagtagaattctggcatgttaccacagtcaaaagcagaatgtgaagctgtatgctattgatgggaggaaaaaagaaatatatttcctacctttcctgtataaagcccagaagattcctgttagatttccaaaatgggtttttatataatataatataattcaacatttttttcagaggaaaaaagaaaaagataagttgcttgaaagtcccatctcttttgctagtcggcttctgtctgataaaattttattctgttttgcttcattgtttattcattcagtagatgttcattgaacacttactgttaccaggcactgtgctaccatagacggtataaagacaaataagctaaaatccttgttctcaaggaatttattattgtagagaaaagtgacttgtaaatccaaaatttcatactgggataggaactataaaagagacatcctgcagaatactgagattataaataaaactagtatgtttgaagcatttagtgtcctagctgttttatagaagtcatttcatttaatcctttcaacagctttatgaggtagatatcattacactattttacttgtgccaagagcactacattcatcaaggaaggaggaggtagtatcaaatttttcagaaaacaagagagttggttatagaaggatgagtagggtagagagtaggaggaagatgaggcagtgtggcatttcagacagagaggtgaatatgtaagcacacaggatgagtgagagaattgttggaatgtagtcagttctaggaaataaaagatggcagggtccagatcatgaagtttggttcttaacctgtagaagacagaaatatgatcagacttgcatttcaggaagataactctgtaattgtttgcaattcctgttaaacgaagaaattttctccagcattgacttatgtttattaaatacatataaaaactaaattctagaaacatcttatacagttatacatcacttagcaatgggatacattctaggaaatgcattgtcaggcaatttcttcattgtacaaacgtcatagagtatacttacacaaacctagatgtatatctttgtttatatttattttttcatatggaaaaccaaatttcttagccatgttactgaatgtcagtcatttcccttacttgatctgcatcaccaacattaagtgccatgtatcagatttctgtatatgttccattataatctcatgggaccaccatagtacatgcggtccattgttgacagacacatcattatgtggtgcgtaagtgtacttatagttttacaactacaaagtgaagcacagagaggttacataacttagccagtgtcacacagctaataagtagcaaagtcaggattcgacatgttaagccaacttcatggacttaaccacagtcctgtattgccactcctcttcatttaaaggcatgcatgcacatattagatttggagacagttctagagacactgaattggcaactacagtcgacaaagagacattgcagcaagtacctctacgttgtttgtttctgtacccttaacttgcagtggtctacaagaaagaatgaaggaagggaagtgatatatttgtcaaccctaactacattgtaaaatgaagctttttttttttctttttttgagagggagtctcgctttgtcacccatactggagtgcagtggtgcgatctcagctcactgcaacctccacctcccgggttcaatctgttctcctgcctaagcctcccgagtggctggaattacaggcatatgccaccacacctggctaatttttgtgcttttttttttttagtagagacggggtttcaccatgttggccagtctggtctcgagctcctgacctcaactgatccgcctgccttggcctcctaaagtgctgggattacaggcttgagccactgcactcggcctgaagcattttatgatgctcactaccaagtgttcataagcggtaaataaagcccttgggctaggtaatgtaagatccattgcaacctggagatgaagaactttgtaaaggggataattgttatcacccatcagagcatcagagttttaagatgatctagatttagtcccactaattatatttctcctaacttttatagacagagaaatcagtgaaaaatatgtatttctaaggattaaatcccaatccatagctcaaggctacctttatgtctaatagttgtgatataatatgttgcttagaataggttctataaatggaattcacacataggaccccagaatcgcttcttcacagggtttcagagttggaggacatataaaaggataaatcaatccataaatctctaagtattcctaaaagaagagtggtgtgtcagttattggcaccagtacatcatgaatcctgctgggctgtggagaaaggagaaactaacctgaacaagactatactctacacagctgtccctgacattctaccacctgttagcattcagtattaatttcatggatcaaatcaaggcatgcaagtgcattaaataactttttaaaaaacaactgctgattgctgacgtctatgagggaagaaaaattaggggctgttattttcctatcaaccatcactctcattaacaagaacaggaaacattacgaataaataaaactcttacatcataccagaaaaaagaacagctgaatcccctaaaggatttcatattctatcatcagacaacgaaagaaaataattccatataaatggctgcatgaatcattgaaagaaacttccctgcttttttaaaagagcaactagaagtatttactttttgaaaatagagtaaccatttgttaaaccgtatataccattgaagatgttttgggtataaaagggaatttccataataattacatagtaatcttttatagccaaagttatgaagaagatcaggatttgggaaaattgtggtcaatatttgattttccttttctgtttgatagccttatctaaattcccctagcttgaatgtagtaaatatgagtgtgtaaaaatgtgtatctaattcacctcttgggggaggtttaatgtaactataaataaaaattctttccccaggttaaaaaaaaagttacatagtgtttaattctaccttttctcatttctctatatccaaaactatcaccaagtactgttaattttactttataaagctctcttgatatgtctcttcaacctcatcaccactgctttaaatgaggcatacttcctcatttggattatggcagcagtctctcttcctttagtctctccttcaaatccacctccatccttcatatcatccatcatgtatttttccctgcctaaattccttggttggcttctattaaatccaagttccttaagcatggcaaacaggggccagcttccacgagctggtccatacctctcctgccttatttcctgacactttcccttataccttgagatccagcttgccagtatttccccaatacctccaccgcatatacaaccacatacatatacacccttatcccctccctcatgtaccacccatatataattctctttaccgcatcctttatcacactcctacaagccttgaagcaatctgaacatagaaaccatctttgattttcaactcctaattgggactgaacatacttgtcttgaacacagattgctgccttgttagtataggtatcctaatatggcacatgtgtatagttgaagctataatgcattccccaagttccctttcaggactaaagggttatttcccaacagctggaagtcctgctgccagacagccttcttcaggaattgccttgtccccaactcaagacaaccctgaaggacctttcccagttttccatggggtccactgaggccttgagattgtactgaagtcaacttctccctctgctgtcgcttcccttccacaggtgtttatcacaagaacaatccttaataaacttcctgtaagcacactctcagagtcagcttgctggggaacccaagctataacaacatgtttatcttgttcacactttcttctgagttctaaatcatgggaagttacagttatccaaaatcttactaattggaagatcatttcatcagacgtgtattgagcacctgcttcatgtcaggcattgtgccagatacaatggaaacaaatcaagacttggcctctgtccttgagtttacagtctgaggtgacagttacatatgaacctaactgtattaaagcatcttgagaatctttttgattcaaatgtcaataattttagtataaaattcaaaagcatggattttgtggtgttacaaagaacaaaaggaaaatatttcaggggaaggaaaatgaatataaataagtagaatgaaattttagaagagcacagaatttgtctttataattctgaaagcctttagggaaaaggtaattttttcactttttattttgacataatttcaaacttacagaaaagtcacatgaatactgaactcccatacaccctttatgcagatatatcagtttttaacattttccctcattctgtttctttacacacatacaaattatttttgtgaactctctgagaacaggttaaatactacattatatcacttcataccttaaaaatgtagtatttcctagaaacaagggtattcacctccataaccacaatgcagttgtcaaattcaggtaatttgaccttgatctttaatctacagtccagattcagattttgttaattgtccccaaaaagatgagtttaggaagagtcatataacttaacatttgtaatgtaaattaaagatctcggaagtttgctaacctgatttaaataccacagtgaaatgaaccacttctgattttctacggagaaagcaagggttaggtccaggttacctgtaaaggtgtgacttagggctccccagaagtgaaccttgctctggagaccccatttggtgaggttcttttcaaaagagattgtatatttttgacccagggattgtcgatttgttgagctcccatgtaagtatgccgccttgccattgacaggtcttcacaatgctttcttaaacgacattctttggaactgtctttcatagtcaggcgacccgccagccaggccgccaggtaggtggaagggcggcttcgggaactagatccggctggttctctgctaacatgtggtcctcgatgctctagcggattggccccaaacctcagcacacagagctttggtagggctggggatgcaggtcagcctgctgaaggcgtctagaggacttgggcgggggcgtgacttcctgctgcaccacttcctttccagccacgtgggcttctgggaccctatgacataatttctggagtggtctgttgggagttgtggcggcggcgaggcccaagcacagctggccaaggcgggtgtaaaacgcgggtcgtgtccaccccaaagctcgacgcctctagaagccatggcttttctgctgaagctagagccggacatgcaggggaaagtagatttgtttcgagcccgtatcgcccaggaggccgaggatctcgtgtccaccttctttcctcagaaggtcttggagctgaatagccgagttcaggagctccggctgcaagacctgtccagaatccattcggtgccaacctcggagcccctggccaccccaggcaacaagggagatgggcccaaccaaaatctgccagttctgctgactcagttctccatcaaggtcccagcactgcttggcagcgagggacagcttctgcggagcaaccagcatctggtggagttgactgagtgggtgaaacctgagatcaagctgctgagagagaaatgcaacacagtgcacatgtaggtgcacccgcttatcctgaaggtgcaggacggcaacaacttcagggtgtctatccaggaagacactgtggaccagctgtggaccgtggatagcacagcggcctcctctctatgcggcttctccacctactacaacacccaggccaagttggtatccaagatagtgaagtacccccaagtggaagattatcgctgcactgtagcagaggtcgacgaaaacgagtacctgagtgtgcgccagatcctgctgcacctacggaacgagtatgccaccttgcgtgatgtaatccttaaaaacattgagaagatcaagatccctcggagcaccaaccgtgataacctatactgatagcctttctccaccccatttgccttcaggagttggcggagctgtttaggcacctagaaggctggttattaatgactctacaggtcatgaaattactggaaatgtgtgttaccatttagaatttcatacagcttatcctcatactgaatcatcttttggtgtaatttttatttgattttccttttgtgaggagaatggggacaaaccatcaaaaagaaaagactgccatttttaaaagcagctttatagataaatgttggcccaaggtttctttattatggccttagcgacattgaatggttttaggggctacttaaaaactaaatcttaaagttaaatgaagtttttcctaaagttctgctatccgttgaactttgttcaaacttacagaaatgctccttttacagcatcatttttctttttttgcgaggaacggagtttaaagggatatgtttaggtcattgtatgcctccagtttaacagattgaaataaaacttggttataaaattttgtgatggcctgagtgtgcttatctgagctttaattttcggatgtggacaattcagatgataatttcctacttcaggtggactcatacacttgatatttttcaactctgatgggtaagaaaagtaagcaaagagtaatgtattttaattattctaaacaaatggacatctacttcccttagaatgaaaagaggaatctgtggaaaatgacttccttccataatcttctatcatctcaggatcttcatttctttttacacaatttagaattccttctgtatatccgtttgtctctttaagtctctgctaaatccatcaagctgtgtatcctgtaatactttttcccccagttgattttcattgccctttctttttgtctcttagatatttcttaaagtccctcattagcatttccctctcaggttatacaggtcattctttttttttttttttttttgagatggagtcgcgctctgtcatccaggctggagtgtggagtgcagtggcgtgatctcagctcactgcagcctctgcctcccaggttcaagagattctcctgcctcagccttccttagtacctgggactacaggcgcatgccaccacacccagctaatttttgtatttttagtagagacggggtttcgccatgttggccaggctggtctcgaactcctgacctcaggtgatccacccgccttggcctcccaaagtgctgggattacaggcgtgagccaccgcgcctggcgggtcattctttaaagaccctaaaatgtggctttgtgttcttttgctacgtcgttgaggggaagccattgtcttctcaacagtaagctatatggttggtatttttaaagttcagcatttccagatttcatttgcaggtaagataaattactgcactgtgagtctattctaacctatgtagattagaaaaatcatacactggtttagcggaaactttattttctttctttctttctttctttttttttgagatggagtttcgctcttgttgaccaggctggagtgcagtggtgcgatctcgactcactgcagcctccacctcccaggttcaagggattctcctgcctcagcctcccaagtagctgggattacaggcatgtgacaccatgcccagctaattttgtatttttagtagagacggggtttctccatgttggtcaggctggtctcaaactcctgacctcaggtgatccgccagcctcagcctcctaaagtgctgggattacaggcgtgagccactgcgccccgccacggaaactttattttcaaagtaaactcctgaaaaatgataacaagtgaaactattcttttgtcgaccttctgaaaagcctgagtctttcaaatctgtgcttaaaaagcaacaacagcaaaaggtattgcctaatagaaagacgtcttacttccttccccttcaagtaaaaagagttctttttattttccctgtaaggtgttctatctgattcagaaaagtgctgggaaccctaaatcagttcataccatttgacaggctttaattgcacacaagtgtataatggacaatgtaagggaagaacaaatgttgcttaatttttcaactaatgttaatcatctaagacttaacatatctgttcctcacataatataatcatcttttgcttgtttcttttactcaaactgtcaagctttatgacagattgaaataaattttctccaatccctggcatgccttttactgagaaaatatgtcctttgtagttaaagatttctggtatatgcatttttcacctttttccaactctgtatcaaattaagttggctctggaatactttataaagtccctacttctgcaaaaattaatctctttgtgattttcccctttcttgcaaatggttggaaaaacttttataataataaacttaggaactggtgttacaatatggtatccaatgtgaatcatttgcctgttattagtacttgttacttgaagccacgtttttgttccttttaagatggcagctgaattgagcaggtgtttttttttttttttttaagaaatggttttaaaaacttattttggaattaagtaattttagttttaaattctaaaactaaaacatgaagaccactaaaatttgattggaagttgaaattagtagatctaatttttatgattgagtgaaatgtcttaaaccacataaatgatggagaagagtcttaaagttcttaaacttcaaacttcttaaacgtttgggcttagttttaaaaaattactgaatcgtttataaatttttctttggttattagaggcaacatttgttttgtagtctttttttttttttttttttttttttttttttttgagacagagtttcactctgtcacccaggctggagtgtagtggcgtgatcttggctcactgcatcctccacctaccaggtttaagcaattctctgcctcagcctcccgagtagctgggattacaggcgcccaccactaagccgggctaatttttttttttttttttttttgtatttttagcagagacggggtttcaccatctcagccaggctgaccgggaactcttgacctcgtgagccacccgccttggcctcccaaagtgctgggattacaggcgtgagctgctgtgcctgtcctattttgtagtctttatgaggtttacatatttatatagaattcttaccaagtagtctcaaccattaatagataactgtgtgatcaatttaagtgatttttaatttcaggccagatgcagtggctcatgcctgtaatcccagcactttggggggccaaggtgggcagaacacttgaagtcagttcaagaacagcctggccaacatagtgaaaccctgtctcaagcaaaaattaccaaagttagctgggcatggtggtgtgtacctgtagtcccagctactctggaggctgaggtgggagaattgcttgaacccaggaggcagaagttgtagtaagctgagatcatgccactgcactccagcttggctgacagagtgagaacctgtgtcaaaaaaataaataaataaaaagctttttaatttcaaaagtaccatctcaatggtcagaaatttgaaaagtataaaaggagaaatcacctatggtttactagcctaacaaaatcattactatttgtgtgtgttttacttattttaaaggatgcatatatgtttttacatcattgcaatatagtatatgcctacttttatagaggataaacatctgcatttaaatccaatctaatattataacttcgtttgatagatatcccctgattcagataacagatacatccattcccccaaatatttttaaggctctgtttcctaattgtgaaaatgatacttgtctgaggcaggaattgtgattagagtatggaacatagagatcaagtagctgggaggaaatgtgcctatatgactgtgagaatgtctagatatttagaatagggttttactctgcttttaggttggggcttcataatagctttagcaacatatctgatcattttattactcagtgctttttccctccccctagagcatttaattacctctaaaaatatgtacaagaaagcattcatgccttatactgattagatgaactgtttcagctttcatgatttggtatgagtaggagggaattctacttcctctgtcagcacttaaacatttctggaaaatgctgtagtgcattgacatcaggcatttttaaaaaattactgatctttgagaaaaaataaaggacccagtgagttacagaaatagatgctggaccatccctgttctctgcattagaaaactatactgctaacacatagaaataactgctcaccttgaactgaaattatccatgggaagccaaatacatccgtctatctatccatcaatcgatagatagatgtatttgtctcattctgtcgcccaggctggagtgcagtggcacaatctcggctcactgcaacctctacctcccggtttcaagtgattctcccacctcagcctgccaagtagctgggactacaggtgtgtgccacaacttttgtaattttgatagaaacagggtttcttcacattggccaggctggtcttgaactcctgacctcaagtgatctgcctgcctcggcctcccaaagtgctgaaattacaggcgtgagccaccatgcccagcctccatattggatgattatacatttgtatatatttttctttgcttgctttattttgatgagtcttcaagtcagtagcagaattttattagtgaagtgtagtaatcccagttactcaaatttaaaatgtttcactagtaaactgaatttaacgaattctctttcatagagaatgttgtgttatttttccttattggtgaaaacctagctggtgcagatgaacaggaatcgaacctattatcagtaaaattagattccttttacaatttggccatttattttagctttattatttaatctcatttttacaaagttatgcaatagtatattggaaaaataatattgctttgaaagtgtgaagtatttagaatttcttaaataaatatatagtttccagtttagatgtttgagatttagaggtgtacttttagccccttgttttatagatgaagaaatttagaatcagagatatatatggcagcacacaactcatctgtgacaaaacaaggtctagaagtcaaatcatcttccatttcaggctagtgcacttttcactgcactttactatgttctaatcagtaaataaaattacattagaagagagttctttcagaaatacgcaaaccagtaaaatttcaacaaattaacatccctttcaagttgtgtgttatttttttctgcaaaatgtaagagaagttgaaatgtttccaactcagaatggactataatatttttactgaattaaatattatgtaaagagctgggctcggtggcacacacctgtaatcctagcactttgggaggctgaagcgggcggcttgcctgagctcaggagtttgagaccagcctgggcaacacgatgaaactccatctctactaaaatacaaaaagttagccgggcatggtggcatgcacctgtagtcccagctactcacaggctgaggcgggggtgggtggatcacttgagcctggggaaacagcgatttcagtgagtcaaggtgccattgcactccagcctgggaaacagagcgagaccctgtctcaaaaaataaaataaataaaaatattctactggccaactcctcccccaccttctaaccttcagcaccaaagaactgctacatagatttgtcatggctgctgctcctaaaaaacctacagaataaaaggggaaagaagagctgtagttttctgttcgggaggaagcctgaaagggtcatttcccaaaagaagtttatcttttagagctggactggtcagtacagtagtcactagtcttgaaatgtagctagtcctaactgagatgtgctgtaagtgtaaaatacacactagattttgaagacttagggtgaagaaaaagtaaaatattttaataacgcttatgttgcttacgtgttgagtgataatattttggatacattaaataaagtagattattaaaattaaatttatatgtttccttttacttttttattttgtgtgcccgaaattttaaggttatatatgtggcttgcttatatgcctcacagtatatttctattaaacaacactgctctggaactaagatttctaaggtaactgagatgatccttggagttgagcctaaacctgctcttgtggtatattttggagatgtgggtttccattaagtatagatttttttgactcctagtaaatttttattgattcgtcatctggttcataatgtacaattcagtaaaagccattcagagagaggctaaacattgtaagccaaaccttcttacagtgcaacttggtcttggaacttagaatgcttacaggaatggatggctagcatgtgctttatgcaagccttttaaatatcatatccaggcttttggtgagagactagagtactaatattctgtattgctaattcagggctgctccatatgctttataaaccaaatagagggtagatttagcatgaatattgagacatttacccagtgtttttatctggatgaaagaataacgtacctctggtgcctcgagagtacctataggcagttaggctttttctcaaggagcaatatttgaacactcaattaaatccccatgatttcattgaattcccataatatagttatatagtactcattgtattctgtgtgtgtgtgttttttttgtttttgtttttgttttttttttgagacagagtctcactctgtcacccaggctggagtgcagtggtgtgatctcagctcactgcaacctccacctcctgggttcaagcaattctcctgccttagcctcccaagtagctgggactataggcgcacgccaccacgcccagctaatttttgtatttttagtagagacagggttttaccacgttggccagaccggtcttgaactcctgacctcaggtgatcctcccacctcggcctcccaaggtgctgggattacaggtgtgagccaccgtgccaggcctgtattctgtatttttatgtatatcctcactaaataagtttcttgagaatagtgtagggttttttattcaccctttttccattatggtgttttgcatatggtaaaattctaaagtattctgaattaaattgagctaaaccaaacctggatgaaactaaagaaaatcgtttctcccctttcttattagaggaggcactttgttacaacagaggatatatgtggataagtgtacccaggaatatgtaacaatgttgagacatctacaaatctgattcagaattaaacaaaggccaatgaagtttctacactgttttctggcttctaattaaacatttttttcatatcacaataatataaatattttaaagtactccaggcagttctccttcagtattcccaggatgtcattaagcctattcaccctgcaacagctgcaagttattccaaacatttgtactgaatctttacactctacaagcccatttgaaatcaactgtgtcaccctattaacagcttcagtaattctctattacttttctaaccaagagttagggagaaataagtctagtatatcagaatgaagaatcctgaaaattgcttttcaaaaccgattctctgtggtcacgaacataatgtttttatttacccttccagattttggtacttaaaaagttagtttcttaaatgtgtaaaatttagatcatttgataaatgattaaaaagaatttcccttaagtttattaagtcttatttggtagtaaatataaaagacaaaacattccatgtaaaaattatttcatacattttaaacagtttaaataaagtaagtgtagtcaactcaaaactccactgccttattcctctgggtcttgcatatttattggtggaaatttttctctgctatttttttacattttacattgtgggataggcacagagttattgaacctatgacctatatattccacagcttacttcaatgcttctattaggcacccgtccagagttgaagaaacgtctcagatcacagcaggttctcaaaaaatgtcattttgtttagcttcatttcaatataacattgatgagaaaaaaaatcagttcccagctgggaccactgtctgtgtggaattttcacgttttctccatgtgtctgcacaggttttctccagtttcctcccacatccttataacttttgcttcacaaacatttattgacttaacttacatcactacgaccaccatcacttactgattcaccaaaaattgcataaattatcttacttgtttttattagtttttattaaatgtatagctcacatttatttcaatatttaatattagaagtgcttggggtctttatttagaagtttggtgatgtttttatagccagaaatatgctgtaggaacgtaactctcatttatatcaattaggctatcataaaactggtttcctttatgtcatttcgcttaaagaatttatggacgacgtgaggaatagtactcaacttttgcttataaataattaacagatggcatgaaaaataattaacagatgacatgaaaagagacctcttaggaagcaatttttacgagcctgctgaactgggagttaacattttcaataagaagccattaagtcaaatataatcttttgcatttaaactctacatcattatattactagaagtctaaaaaccaaacagtatggtaggaagaataaaatgttacttatgaatataatttctgattatacttttagaaagaggattaaaagtattgacaacaaatgaagtcagaatagcttgattaaagtagtttatttaaagtatctccttaatgttatagtgtatgctaattatttgctttgcatatgtacacatcatgacatacatttatgcattagctgagacatgttcattctgtaagttttgtacaaaactaatgatcttcagttacacaagaacatttaaaagttttacatttgaaatagataattaagcaatgctgtgtgaaactgaaaaatgaaaactttgattaaaaaaagtattttcaaatataggatagtacatgtatatgagaatacttttttgggtataatcttagtaacatcattatggtgttatgtaaacatatgacatatgacatataaaattatagtagatagatcactgtgttacccacttacacattcttctgtcgtattaagcaacaaacattattcttatctataataaagcagatatttctgtctgtcatacatatgaaatatttgtatgtatttattggaagtaatttttaaggctagtctttttttataatttcaacttttattttagatttggggtagatgtgcagatttgttacattggcatattgggtgatgctgaggtttagggtatgaatgatcccatcacccaataatgagtatagtacccaaccagttagtttttcaacccttgagtagacattgctccaaaggaagatatacaaatggccaatagcacataaaaatgtgctcaatatcattagccattagtagaaataaaaattaagaaatgtttaaaatatttaatgttttatttgaaaaaaaaaacaattaaaattttaaataacatttttaatggaaaataattatatctcccaaagcaaaaaaaaaaaaaattagtgagaagagtagcactgttttacagttttgcagatttttaatatgtgatttaatggaagataacaagattcttatatatttctgtattcagtctgttgcaatatattgttttagttgaaatatatgaagaaaatctaccctcatgcaggtaagtagttgcaaagggaaggagtactttaatagccttttcaaataattgtgaattattgttttgatactacataaaaactcagcaagtggtaatttctttaaagattagttgcactatagaatctaaagccatatcagtgatacttttaccctctgtaacattaaaaatccattgatctatcttgcagtttgaatggaacttgtacccatgcatgattttgtaacatcattcactgctcatttggaagatactggttcactaagagttaggcagatcttctaaatatgaacatatttcattatacaatgtcaaaaaatcacattcattaatatcaccacgaatcacatcaagaaggtcatactcatggtggtagatacatggtttccgaaattcggattttcactcaaaatcccaaattttataatttgcaaatactgtcaagtattttctttgaaatatcaggcttactgcatttttaaaaagtgcttaatgggttacccttgcctgaataacaataattcgccattatttcaagtaaaagtggtattgaaaaaagtgggttgttcagcttgtaaatcattcacccaagtgctttttcttgagatagccattatgcttcagtaggcagcaaaacagttttttatgttcttgccctttcatcacagagaatgttaataatttttactgcttcaacaaggatattctaaactgaaattggctttaaaatattttattcatttattcatttgttggctgattcattgttactgtatgtggcggtgaagaatacagtgactgctagactagcttggtgccactacatagatttatactaaggcctagcagtttggctttgctttttcaccaacagagtaaatttcaacaaagtgcaaaaaggcttgaaaatagtttgacctgaaagggtcttagagattcttgcctccttagggaaaaaactagttaaaaatctattataatagctctcctttagctagtttacattataaatcgtttgtggttacctactatatgaaaggttgtagtagatcctggggattcaccaatgaacaaaacagatgaaaatgtctgctgttatggagctcatggagctcatttataaagggtaacgatatataataggtgttagagagaaaagtaaagcagagaaaggaaaggaggtgtgtttggtgggaatgtgtgtgtacaatttaactaaggtggctaggaaagacctcactgagaaattgacatttgaatgaagatctgaagtgggagcaggtaaaggtgtgtgcctctacaaaggccacagctgaggccgcccttctttatctacctcttttcatctttccaacttccagaccttttttttctgctgataactcataccttttaattaaactttaatttaatttaatttaatttagtttcttccaactctgctctccaccacttccttgcccctagcacacacacaattaatcagcacttacaaaaacaaaaatttacctctttacaaaaggtacagggatagagtagaggctttgaatacttgtgcttcaattatttttctcctgtcatcttttatattaaaggaaataaaatataggggtgtctccttttcctggttgaattggtagagaatatctatggcagttagtgctaatgtttataaaaaggaataaacacaagtgagatcatgatggagagagaccaaatcagtagggaccaaattataaagagatttcatttctaggctaaagagtttggattggtcatgtgtgcctgtcatcctttatttcattcagtagtggaacaatggctctcaactatgtggttgagggaataaacttaaacaacaaatctaaatttcctatatcagttgcatttaactgttgcgtttcctcagggacttcactctcctcaaactttttggtccctttttttaaaaaaaaaattattgaacacttataagtgttgaaatactaacttgtctaatctttataaacaatcggtgcaataggtgttgttactgtccctattttactaaagagaaaatgaggacacagattaaggaacttgctctatatcctacagctagaaattaagtgatggaagcagaattcaaacccaggcagtctagctccagagtccatccttttaatctctgtctgtgccactctggccagtgtttgtgaatgcagagtcctggaactatctgcatcagaatcaccagggatacttgttaatagtgaaaaattctggcccacctcagacttaccatgtaagaaattgtttttcaagagttgaggaatgtgggtatttatattataaaatcctgcaggtgattctgatatgtatcttttgttaagaacttctgttttagaaggacctaccattggcactgtttttgcttctgatcccagcttcctatgattaaatgctttctgaaagatacatagttagtacagaacttaatactattatactattctatactattttaccccagtttgacttttaagctgttaccacctgaaatttaaatgaaatcctttttagaacaatacttgaccaaacaatttaaaaattgtatttcctacaaatgcatcataccttaaaaatgcactttaaaactgaatggaagccaggtatggtgactcacgcctgtaatcccagcactttgggaggctgaagtgggtggatcacctgaggtcaggagttcgagaccagcctggccaacatagcgaagcactgtctctactaaaaatacaaaaattagctgggcatggtggcgggtgcatgtaatcctagctactcaggaggctgaggcagaagaatcacttgaacccaggaggcagagtttgcagtgagctgagattgcgctactgtactccagcctgggtgacagaatgagactgtataaaacaaaacaaaacaaaaaaacaaaaaacaaaaaaaacaaaacacacacacacacacacacacaaaactgaatggaaactgagaacttactgttctatttatgatgaaagaaaactggtaggctttagaaagtacaccctatgtgatatgaaaagtgaactcttctagattgtggaacagctttatatagtatcatacctccatctttaactaggattgcagctggcaataaagctcagcttctaatgcgagcaagtgttgagtttggctattttgttaacccaagatcctgagagaaaatttgttcactgatgtacataaagcatattatggttaaaatttcttattccactttgtagtttgccttgttaagactagtctttcctaaaatgtgctttaggggcattttatagtcctccatatttctttatgtgacgccaacatcaaaattgctttgaaaaggatcaagatctggagtgaaggctggaggaatagctagacactgaggctcatgcaaggagagttaactttagaaatatatattacatgaaacccctttttttctccccttccagaaatttgtagaatcattgatatgaaagagttggctagtatatctccctgtgttcccttcccaccctgctgtgctatccacacaaacacaagtggcatttgaggtaacttttgagattctgctgggttaaaaaaatatatattttttgtctcaacccaatatgttcctttttttcaacaaaaagtataatgattctcctatatatctatgtttagctttttgctagaagtgtttcctaataacttttctcaggaaacttgttgactcaatttactgtagtcatagagcctcctacctgaccccctgtggtctgctttggtaacacacctgtaggaggcaatgtaatcttcaggaaattcacttcctaccagtagtcctgagtaaagtgaattttctaaaatgaaacatcttgtaaacattatatatgacaaactcccaaatggttaaactctttatgcatttagtgtttgatctttttccttaagaagacttttttttggattgctgtcctgttggcactcaacaaattacaattgctaataagtttcagaggccctaacttattttcctaaatcatatacttcccagtttttgaaaaggctctctattatagctaacaaagttttgaactttgattaactcaagtgtttttgttgttgttgttttgttttttgttttttgtttttttttgagacggagtttcgccctgtcgcccaggctggagtgcagtggcagcgatctcggctcactgcaagctcagcctcccaggttcacgccattctcctgcctcagcctcctgagtagctgggaccacaggcgcctgccaccacgcctggctaatttttttgtatttttattagagacggggtttcaccatgttagccatgatggtcttgatctcctgacctcatgatccatctgcctcggcctccgaaagtgctgggattataggcgtgagccactgcgcctggccaactcaagttattgaatgaagtaatatgaagcacatgggcagagacttcctggtcctatacctgtccaaggcatgtaaccaacattttgtttaagagctttccctagggagatcaatcctgacctggtttagaaacattttttcctgaaactctcatgaaaagagaagaatgattttggatgctactgtcttatcggaaagtatttacaagaaaccattttgaccaagaaactcaaaattaattctggtttttaaaaagagaggcatatattactcttagattgaaccttatgaaattactgatatttgactcaccaaaatgacagttttttatggtccaacctaatactttttggtgttaataaaaggggaggcagggttagttgggcagtttgtgggggacatcctacagagtttgacatgaaaagtatatcttaaatcaaaacttgaatttgtacttattaggatttcaagctcatttttcctctggtgaccttgccagcattatcagatttgtattaagtgtcaaaagtttcctcttgtcaaagtgtaaaccttggctcattcttgggccatctgttgtacactaatagttttgatttattcttctggctgacatgcgtattaatggtacagatgcaagctttatatttccttttatgggtctgtagttttattgcatacattagtggcacaaatacagcattcatattagctatttatatgaactatttctagttttggggtgactaatatactttgcttatgtttttactatgctgagaagccctgtatcgtagacattttaatagactttaaatgattacattctacttaattttaccacccctaattttgttttttgtaatttttattttcaggatatgtcatgatgtatgtctgtatatttttatgatttcaaattcccaaattgccattgctttaatgaatgagcacatttggtttttgatcaggaattactataactactagaaaacaacactagtgcaaaatgtgaatttagataaataactctgaaaggcctacttctagttgatgctttggctctgatttttgagggttaatatgttcttcaacttctttgacagcttgaaagttatgaaatagagtgatagaaaacaaaagctctctaggacagggacataggttagagaaaatttaatacaaagctgtttttgaaataaggctaggtgctatttttatttttgatctgcttttaacagtttcctatattggaaaaccaaacccatctctggaatccagtggatatgggccaaatataaaatgttaagaggctggtgttactattggtctgctatgcaaaactttttccctaatagaggtctgtgttgatctgtgtgaaagctgctcagtgtcacaagtgcagcctgagtttcattcatttctaggggaaattatgatagaaataacattcctttctattaaagataaagggctccaaccttgagccagagttttctaatacagtagaagccatcttatctatatagtgggtactagtagatagtctgttaataaacaatactggctaaaataattttttaaaaagatatgtatctttatttcatttgattatattaatgtgcactcattggctagttttgtatgcagggccaatttcttttctttgagtccaaatccactcttcagagttccatgttgccattcttgcataaactatactcacaaatcagcaaccataatttccagtcttggttacagttactgtatattggaataagaacttaaaggtacttgttaagcaatctgagggcagactattatgatttttatggttgctttgcaaggagagaacattttaaaacttacctttatctttttgctctcttttcacactattagtttatgtaatattttattacacaattatactaatacaattaatgaaagtagtcttgaaaaaagacacaactcaactagtcgtgaatgttccctgtgctatgggcaccagtcagtgagttttatagggggaatgggaagggtcatttaatcagtctgtactctacatagatacgtagaatcaacatttgataactctcagtagggcctgaattttattgtgagttaccataattaatttcagtggagcaaaatgtggtccttttcttttgataagccagtctccaatgcttttgttttcttaaaaagacaagaaacgtaactttgaaggctgtgttatacactaatattctgttggtttctaacaaattgcttggaagagggaattgggagaactatatgaaagtagcatattttctcatgcacaatattgcacaacattagaaaactgatgctttattttcatggtgaaatgttttgatgtttctccccgccccctcccctccatgtttctctaactttttctgggaataagagtaacaatacattgattataatatttgtccacatgatttcattccagaggaaatcctatagtatctaagccctacggaaagcctcataaagacatttcaggagtccattcgaagatgtcttaaaattaatgacattgttttgagtgacagtgccgaaatatatttctttctatggcaacattcttattctactatcctttttatttttaagtagtttcatttttgtcactgttgggttattttaaacaatttaattggagggaaagaaatacaaattcatcaaattttacctccagaattgaatttccttcactagttccttaataagtatttaagtaaaagggggtgcaatatcaagaagactaaattataaatatggtttctatgctgttaaaaaataacagtcctgtccttaattaaccattatggagattcctcttgaccaaatacctttagaactgtttcacagatttataatttaactagtaatttggtttaggtttaggtttaagtgacagaaaatccaaaataatagtggcttagataaattataagtttatttctgtctcatgtataagtttcagagatctaatgatagctacttaatcatcgggatccctgtctccttctgtcttcttgctccataatcctcaacttgcagcttctgtctcatggaacaaagacggctactccagctctggcagtcatatctgccttctagctagcaagaaggagaaagggaaggaggagggaagccttccaccattaccaccttgaagaagttgccatttcttcttacagtccgttgaccagaccgtgtagccttatttggttgcaaaggaggctaggaaatatagtctttattctgggtggccttgtgcccaactaaatatcacaagtcctgttgctattttaatgttacagaggaaggagagcatatattgggtaagaaaaaaaaaaaggctgtttctgccacaattcagtttccccaacaaaataaaaacttggatttatattctttaaaagaaaatatcctctgtagcacagtgctgaatacatgacaggacactgtgctcagtaaattttttttaagtgaacagtaagggccggtcacagaggctcacacctgtaatcccagcactttgggaggccgaggcgggcagatcacgaggtcaggagatcaagaccatcctggctaacatggtgaaaccccgtctctactaaaaatacaaaaaattagccgggcatggtggcgggcgcctgtagtcccagctactctgcaggctgaggcaggagaatggcatgaacccgggaggcggagcttgcagtgaatggagatcgtgccactgcactccagcttgggtgacagagcaagactccatctcaaaaaaaagaaaagacagtaagaggccagtaaatatttattgagtgattacagctcctttgtttctgaaaatgtgactcacagtactaatgatctgaaaaagagtaagatgaacacagagagaaagtaatgattcaggattcattgttgtgaggttcaagaaacatttattttgaggaagtggaggtaaatattcaatgaagttaactacattgtcccagatatatagataagatagataaaatgtatatattatatagacacttatttttattataagatatgtactgttagagttggtagtataccagctttggttccctgcagtctgatttttgggcctcttggtaaacaagtacttaaaaactgttaccccagtttgcaaacctttaataattagagacaaggcaggttaactgtaataattcgtatgcatgcaagatatgattcttctttttcataaatcatacctagtttttagctttctgctgcaaaagtaactagtttgttagaaatttagtgaaaagaaaaagtaggagacattgtgttcagaagatcatgtttaaaaacaacaattagtatggcatctgtatcttagcaggaaactcagaattaagtctgagcctgaccttaacccatgaccagtggaatctaagtttgtttatttttacaatagccttaatttggggcttgcaagttttttggtttgttttcacattcaatttagagaccctgaagcagtattttaatgataggaattaagctatgtataactttcatggcttgaagatcagcaaattctgttttttcttggttataatgttatcttaatcagaaatgtgtgatctttgtgtctaacaatgcacttaaaaaaacaaaacaaaaaattcccttgctgcaatgctggaattctaacagaatttactcatcttctctctcctccccaatttttaaaaacatgttctcatggaaatgttgccttgaattacacaaaatacaagcagttactggaaatgttttctacacagttctgttcatgtatatcaatttcaatttgtttttcactttttagatttttttcttagttttgctgataatcacacttcataatcatatcaactttgaactttgaagttgtgttgaatttttattgctctcagctgtatcagatcctactttttgatgagttatttcatatagtaagtttgttgaatgaatggtgaaacaatgaacacaggaacaagaaaagaaagcaaaatgcatcaaacttaggtttagttttatctccagtttaaccatgctcccttaaatggaaatgctaatatacttctttttttcttttttctgtaacagttcatatgtttttgctaggaagaagaggagttactgaaaacagtagttaatatcaaagtcataagtcatttataatcagccttagaatgcctacagatgtatatacatttttcaaaacacttatactctgccttttctgaagccaagcttctcttggcttattcttacttttagtacttgtgtgctggaaattagaaacctcagatgccctgcacagtgtaggactatacaattgtgctaggcatgtatttataattctttaactcttctaccaaactgtgtgctttttaagggcaaaaactgtacaacttctttagcatgcacctgtcacttgcaaataaatgtctaattctgtggtcccttcaaagggagaagaggaggctaagcaggcaaggctctaggccttggccctgcttcagtcagaatctttcttgtacatgttgataatttctttcttctacagatagaaaattcctgggataagaattttgatgggaaaaagagtttattgcctttaaaaaaaaagtttgagaatgactgtttaggggagatactctcagtatcttgtgacattatctagtctagcccccatcattttacaggactggaaactgaaacacagaaaggatacgtagtcttgtccagattatacagctatttagtggcagaattagaattaaaatcccttgtcttgactgcttgaccagtattctttatagtggtgctacagcatatgtgttgtaaaaacctaggagttttccaagatcactgcatagtgcctgacaacggtagacactctgtaaatgtgtattacattaatgaatgaatgattctaagctggtttgtagttaattaagccaacttcaaataaaaactataatttttcatcatcccaacgaaatattgacctcttagaagccctgaatttggcctgttctaggactaagccaattgttatatataacagattgttctttgttaattttaggatcacctgctgttaccagctaccacccataacaagaccacaagaccaaaaatgtcaattgtgttaccagcaataaacataaatggtaagttgaaattctgatgtatgaacaatatgagatttctttgtttaaccaggattctcttcattagttcaaagacatttaaaatgttcagttaaatgagtatatatccgtacattatttctgaaacatttttccactgttttattatttttaagatccattattcttttaaaaaaaattactacatccctaaaagaaaaagtagctttcttttacttacaaaattggaaaagctagcatcttgactgctctacagacttgcatctgcgacccttctagtcataaatgtagtgtaagaagcccctgctgtgttctgacagtgaatttgtaaattagatttttggaactcaaagcagtttcctgtgttacctaaatgttgatatcatcctagaccatgccacagaagcctgtttatgtttaattgataatactgatgagtttgacactgatagtattactattgcattttgttatattactagccctggacattaaacaaaatacaaataataatataatgcacagatgttaaggcataatatacctgcttatagtttagaagaaaaaaaaagacaagcacaaaaatcactgtactccaaagagaaagtcacgtaagtaatatgtgaggtactaagaaatctagtgaaaagagattactttcagcttgattcttcatggagaagtgaaataactcactcccattaccagttgtggattataaatgagcacagtgtatgttattgactaattgctttctctgacacattatattgaaaatcggagagttggccatctttttcaagtttgtgtatctcacataatgtaggtactagtaaattttctgtctggtagcaaaaacctcagtatatgaagaagatggaaacgaaaagccctttgaactaacctgcagtcgaaccagttcacattttgattgataaatataattaaaccttcaaatacaattataaaacaaaacactagaattttggggggattccagataagtttcaataaaatttagtctttaggggaaaagtggtattcatcatacattttaagaccatagaggaccttagaatttcatgatctgtatatagacagcttattagaaatgcttaggaagtaacttcatagacataaacataaatgggctttttgttaaagcataaaaattacaatatttacttagccttacaaagacattcagaataagtttaagaaaaacagtaacattgagaagaacatctctttcttcagtaaagacatacctttgaagttactcatggaataatcatttactacctgaagaagaatatattccaaagtgcattttattacattccaaagaatgtatttaggaagtctcacttatactcaatctataggtacctaagtttctctgcctaaactagaatagaccaaagggtcagcttatgctcagaaaggctattttctaagctttatcaaggcagaattcacttaattttgttcttctgatattgggttcttatgcaagagaatgcctggtcttattttgtaacagtgagctatctttatattaagccaaaaccaacaagatgctgtttgactatgtttatcttggccaggtgactgatttttgaagaggagcctttcatggatttggaaaaatccagtcattagaggatcattgtctttttaatctgtttcagactctttgtaaatagtctttttaaaaacttccctttttaggataagtcctattaaaaaatcaaaattcaaattcaagaaatattgattgaatatataccgtgtttcaagtaccatgctacatcctcagccttttctcttaacagtcttgctctgaggatacttcttaaattagagcctgattttttccccttcctcatgtacctcaaagtctgcagcagggcaggtggtatccttgcttcccactacaactttcaaattatttctccttcagtccccttaacatcttgcaaatctgtcacatcacactttactcctctaacccttatttgttgctgccgtctactccaccttcactgacgactcctccactgcctctgtcatcctgctgtctaacttcagcatccgcatagaggagtcattagtactctagccttttttgatccagtcatcttttattccgcgccacctcagcctcccatccatatggtcataatctagaccttatcatcatcaacagcagcactctctttgaaatctccttttcaggcatcccactctctgactgttacttactctcttactttaaaactcacactccaactactctcttaacttacaagtctacagtcctttgaccctgccacttcttttctgtgtccatcacatccttaatggccatacattcctccttacccagcttaaattccatggtcctgtcaccactctcttgtgaacaccccttacttcctggctcctttcttaggtcccactttcttggaaaaactgctttctaggtaaacccagctcttctctctatgcctgctctcaagcagctgaaaattgctagaaagtaccgttcagtgagaacaagtagattcacttcaaatttgtgaccattaatttcaaagggatatttaatatgccagtcattactagtaaattcactttccctctctctgaaaaaaagaatttctcaccttctcttgtcaaaactccaacatcctctctccccaccccctcagctgatgaactcaccaaatactacactgagaaaatagatgtcatcatgcaagagctacatcatgtttccactaccaccggcccagctgcatctacacccacaaactctgccttccctcttgttgcactgaaagaaaagtctcttccattgggttctaaatcccagctttgctacttgctggatatgtatcattgggcaagttaattaacttttctgtacctcagcttcctcatctgtaaaagaagatattagtaataccttcctctaagagttgatgtgagaatgaaatgagtaaaaaagctttaaatagtacctgactattttggggttagctgctgttttactgcaataatcatcattgccattgtccttaagacatcattgccaacttctaaggtaatttcttccttttggaccctgactcctagcacttctcacagtgctcaaagactttactctgcatttataccattcgtcttttatacagtttcttcttctctactgggtcattcccatcagcatacaaatgtctttttttttttttcctcgagggagggactcattctgttgcccaggctggggtacaatggcgtgacccatggctcactccagcctccacctcctgggctcaagcagttctcccacttcagcctcccgagcagctcctgaacacaggcacattccactcccagctaatttttaaattgtttgtagagacagagtctccctatgttgcccaggctggtcttgaactcctaggctcaagtgatcctcctgcctcagcctcccaaagtgctaggattacagacatgagccactgcacccagcccaaaatgtcttaatattactgttacctctggtgtagggagacttctttgacttcacatcctatttctctgttaccctttagagcagaactctcaaaagacttacactcactgcttctacttccttacctctgattctgtcttcttttcacccttaccaagcttttgccatttcacttcatgaaatgctcttgcccttccactccactgaaatgctcttgcaaaacggaagtcaatgacaaatatctcgccaagtcaaaggtcatgtctccatggtcatcttacttgacctctcaacagtatttgacacagctaactattccctcttttttttagtccacccaattcttatttttaaaaatttcaaatctatagaaaagttgacagatgagtgcagtaaatatctagagacccttaaatagataccaccaattgttaacatttttctatatttgttttatatctatctatgtacactcaccagattttaaaacctatttgagagtgaattgcagataacatggtgctttacccctaaatatttgaaaatacatctgctatagaaaggactttctcttgcataaccacaataaaatgatgatactaaaaaaaatttaacattgatacagtagagttcaatgtatagcatatattcaaatctctccattttcccccaaaatattctttataactttttgaatatatgttccaaagattatacattacacccactcatcatacctctttggtttcctttaatctagaaaagctcctatcctttttactgtctttgatgacatttacgtttttaaaaattagacttatttaggtataatgtacatacaataaaattcaccaattttttgtatacaatgtaatgaattttgacaaaagtaaaccattgtgaagccaccatttcaatcaagatataaatgttgtcactacttcaaaaaattccctcatgctcctttccagtcgttcccctcctgtacatttttgacatcccttctttcttgaaatatgttattttctaggctttcatgataccatgacttgtctaggtttcctcctgtatctcctcagtcagcttatccagcttctcctcttctgtcaggatggaatcttgtttgttatgttcgccacttaccaccatatccccagcccctggaacagtacctggtgtaggaaaccttgaaagatgaggcactttcatttacattaactcatgtcatgctgagctgccagttaagtgcaggctaactgttctttattcaaatgctgggatcatgtggtgtgaatccattggtcaaaaaggaaagataagaaggacaaaatgcatgggaccagaattatttcagattttggattgtttcagattgtggaatatttgcatatacataaggagatatcctggggatgggacccaagtctagacatgaaatttatcatttatgtttcagatacaccttatatacacagtctgaagataattttatacacaatttttttttttttttgaaggcagagtctcgctctgtcgcctgggttggaatgcagtggtgcgatctcagctcactgcaagctccacctcccgggttcacaccattctcctgcctcagcctcccgagtagctgggactacaggcgcctgccaccacgcccggctaattttttgtattttcagtagagttagggtttcaccgtgttagccaggatggtttcgatgtcctgacctcgtgatccgcccacctcggcctcccaaagtgctgggattacaggcgtgagccaccgcgcccggcctttatacacaatttttcacaattttgctcatgaaacaaagttaatatacattgaaccatcagaaagggtcaggtgtggattttctgcttgcggcattatgtcaacactcaaaaggttttagattttggagcaatttggatttcagatttttggattagggatactcaacttttattctctttattttttatagataatgcctcaagaaagtaattcataccatttgcacaaccactatatagcagagccaagatttacatacattgtataaaatatcttctaattaattatattgttaattcaatattaaagacagatgtgcaaggattgaaaatatttgggactccaaaatttaagatagattttataccattttattcctacactataaggtgggaaagattcattgggagcagtataacataatacagtcatttgaatttgataggtatatgtttgttgaataaaagaataagtaaggtaaatgttatttggtgataactttgtgaccacttgaaaatattttactagtttaataatattttatataattaataatagttagcaagcacagattagtctaatcttttcaagtgtaaagtaattaaaacatatactaggctacctttctaccacattgagatttggacttcagagtgaattgaaattattagcctccttttcagcaattgttctataaataaaaccatgcaaaaagttgtcctataggaaactataattctataggattcttcaagacccagagataaatttctttggcttattagacttatggatttgacaaattatattataattacataatgtataatctgaagagtttaagttatgtaggcacaaaaagtttgagtacctatttattgaaagagcagagacattgtgaggctatccctaatatcagagttgttcattctgagcatataagggtttgagaaagttgaataaaatacattttctgtcatttctgagtttaaaagttacatacaacttggaaacaaaaatgagttgtggaggtgatccctctctctgactcaagtggagcttgtaaaattttggagagggtggcaaaggatagaaagtgaagacagaaattcagattttattgagcaactggtttatgtaatatgctggatggggatatttgtaagatgaatttgattttccaatttaagcacagtaaattacatttccaggtcaatgtctggtcttaaactgtaacgtattatgattatactttgtggttttaagccatggaagaaagtttcagaaatcgctaaagagagtaggatatgggtgtgaaattaatgccatttagaaatcacgtcatatcatctgtgttctccatgccagttttatttttgtaatttattgttttttactttgcattctgtttattatttaaattcctttgtttcataagagagttgaaaacaggttagtgaagctgcaagaaagtaagtctttctttgtctgaggaagttgtcacacaagattattgaaataaaaatagaatgctaggtatgctttgaaaaggcttttttaaaaaaggattgcatggttggtggaacagtggatgatggactaaaagctactgatttcttttttttaaaggattttggaagttctactagtagttactgtaagctaacatttcctgctttcaaattatttctacttatgttgtggtaaaactgttcatttcctttctttcactcttggtaaataattgaacaagatagagcatagaaaagggggtttttaatttgattttttagtgatatgtttgttttttaatggtagatagctaaactttgtagatatctttcataggggaatgaattctatgaacaagccatcagcagatatgtttcataatttggccaacatgttcattgatttgtttttactgtttcccttcccttctgtgtgccaggtacctgtttgtgtggtacatgtgtaataaaaataaacaactgtttataactgttacttgaattaagggcccacgtagatgaacaaatgactaccaggctaaactgtaattatatttaatctcaaggtaatttccatccatataaagaaaatctagaagagcttaatagcaatggttgcaaatactagtgccagcacatgcaacacatttttagttggagaggtcgtaacagaagggtaggaagcaaaccaaccaaataaatgtgttggttttaaaaataaaagaatattcatataactgcttttgatgatcacagttttttggactatcccaaggcaaatatatttggaaaccgtcctattcattctgctcaagcagcctggtttcctaagcaggtcgagagtttttccttttattcttctcaatatatttctccttaaaggtctgcaggttgtctattttttttaaaaaagtattatctaccttgcattttcattgtaattcatttcatttcagtttcatataattgcatccagacagttgaatggagtcttcacttaaaactatgttttaatttttaaaaaatacataatcatagttctctttctctctctctctctcttttttttttttttttttgagacagagtctcgctctgtcgcccaggctggagtgcagtggcgcgatcttggctcgctgcaacctccacctcctgggttcacgccattctcctgcctcagcctcccaagtagctgggactacaggtgcccgccaccatgcccggctaattttttatatttttagtagagacggggtttcatgatgttagccagggtggtctcgatctcctgacctcatgatctgcccgcctcggcctcccaaagtgctgggattacaggtgtgagccactgtgcctggccatcagttgttttttgtttgttttattatattgagaagtccacagcaaagaatcacagtgaatgagccagttgctgtgttgagtcaacggcttaagagtggctaaggccgagattgcagaaattcttttggcctttcccagatgatcacaaagtgactgttgcagttcaagccatcatatttgtattacaggcagaaaaaaggaggtgtctatcaagaaagcagacattttccagaaatttctagaaagctctgcttatgtcttattgaacataaactgtgtcaactatttaggcctggcttcaaaggaggctcagaaagataatattttaactaggcacattatgatttgaaaaaaaatttggagtctttttagtaaggatccaccctcggcctcccaaggtgctgggattacaggtatgagccaccgtgcctggccatccgttgttttttgtttgtttgttttattatattgagaagtccacagcaaagaatcacagtgatgaaccagttgctgtgttgagtcaacaacttaagagcagctaaggccaagcagcagctgcttgctgcagcactccatcatatgctaaattggaattgagcaaagtgtctgggaagagacagtaaagagaggattcatgttgaaaagagaaataaatatttatttattgcatgggatgcagccagatgatttaggtcattaatgagttgaggaagtaactttaaactatcaaacataagaataatacaatgaagactctattaagagattattaatctggctaagaattgtatatagaaaaaaatgaagagcgaagatgagctaggatagatactaggatagatactttggaacaatctcaagatgaggtgattcaaagcttggaatgggaagaaaggaaaaatttccaaagaaattccaaaggaaaaatctatagcatttggcagctgatgatttataaaggagagagaaggaaaagctgattccatgattttgagaccagaccactgagagactagtactgccattcaaagaaatggataaaatgggagggacagtgtgagatttatgcatcttgaattagagatgtcattggtgggtatttttgtgtatctcttgtaacagattggtgtgtatttctgtgtgtctcttgtaacggaataccaagtaattattgactgatgaatttcattttctttcctttttgttagatactaccagccccctcacaagttagtgtccctttccatctgttgtattgtcttagacttctcctcattcaccaccttgatgcttttacaagataacaaagcttatggagataggcatggggcagcaagaaatatagagtgggaatctgcagagaaaagaaagatgagccctctttctttgcttgttttccctgtttgtttgtttgtttgttttttctctgctttgccttgggcatgattgggattactgagattattcctcttgtctatattgttgcattagtattttaactggtgtccctaatttattatttttccatcttaattcctacaattcaccctgcatactgctgccaagatgagtcatccttacatactgcttttgttatatcattatccttcttgagaaccagcggtggattttcagtgtctatcagatgaaatccaaatgctttagcctggcatctaaggcccaggacagtctgtccccacattaccttttcaactcagttctaaccaaactgttctactaacagttccttgaatctgtattcattagttcatttaaaaatactcattcactgattctcctttatgcctaatgctggagataccaacatagaataaggtacccatgatttgtactttactgtagcctctaagtgcaagagacagaagaaaacaaaaaaaaattaacaacccaaacaaaacaattgcagcttatgacagtttgggagaaagaaagaaatatggtcccttcatgaaatatggtgggagtcaggggtagagaagacctttttgattgggtaatgaggggataacagttaaaccaagatctgaaggatgagaagaatcaactgtgaagagtcaaggggcagaagattccaagaagagggagcaacaagagagcagaggccctgaggctggaaagaatgtgttcgttttaggatttgtcagaagaccagtaaggctagagtaggacccagtagggagaggaaggaatgatacgagatcagatcgggaaggtaaacaggggccacatcagacagggaattgtaggccacggtgaagagttgtgatttatcaatatagtgggaaggtgctgaggagtttgaggtgggaagtgacttgatctgatgtacatgtaaagagatcactctatttttgcacatgtggtgtccatgtcttggattacctgtcctcttccctccaggctatctcctacccatccttcaaaatccagctgaaatcctaccacctctgcaaaacttttgctttacttctgtggaccactagaatacttctgtaggtcctagaataaatagtctttcctccactgaacctccttaatgtaaccacctctcatttatggctttatctaacactactcaaagataattaccttgaaggtggtggtgttttttttttatttaactgtgtctcttcctcctcttcatcccatgcctaaagaaatgctctgatacttaatttttaatatatacttagagttgggaaatttttgcctttttatgattcacaaaaaatagctgttctatagctgtatcttacctccctcatttcctctggttggccttacttccctcttatttcttgaagtcattagtgtatccatttttaactcttcccaaaccattagattttctcccacttagcagagcctcttctgaactctctactataaggtaaacctggaaataaatagatttcttaagtggaaaaaatagggttaatggtagagctgcctttatatacttggaatgttattactttgctaagaatgattattgtgttgatgatttattggcagttgcatgggtaatttttccatgaatagtttatattcattgtatttgatttactaattaattatttagtttattagaaccttcacaagaccccagaggtttagattcaatcagcttgcattgatccttctaggatattagttacttctttgacccaaaggagccagttgctgagccccctgtacctaagtgaccttcagagtcctgttagctttcagtgagatcacattcactctttctgccttatggcaaaaatctgtttctactcaaacagatggtttagctttcaacaaataaaaactagagatcagcatctacttaagccaacagagttggtttgagcctcccactaactctccaaagtctgttattttttattttttaatgttaagctcctcctaatggatttatctttgtacggggaaatcaagaaccttgcactttgtcagaagatgagccacttcatataatctcaagtttctatgttttagaagaattgcttagtaagcacaggttcgactgctctgcgttctctcttttgcagttacaccaactggaaacattggggatcataactttctgtggagtgttacataggtgtgtcagcagttacatgatactttctttgttatttaagacatctgcaagctgaggatggccagtgtcatttcagagatgtacatgccaaagacatggtagttttcattgacattgggaaatactccttctcttgagcttttacaaataaaagttagagagtgctaagaaatccacatatttaaaaaaatctagaatcttgacattgaaaatataaatgcagattgttaattatatgttcctgtgttaagaaagcattcttgctttggggatcttgagtacatcagacaaaagttgcctttgaactcaaccaagtatccatagagatatttgcctctatatgtattattaattttacagaaacaaatgcctagcttaaatataatatttagattaaatagtgagacaaatgtaacctgcacaatagtttgctgctaggaaaggaattgttaggaaggccatataagcagtttctttgaagatacctaggacctatctctttcttttcactctattatgtaggacagaaccttgtgggaaatgtgatctacttggcatcattatggtatggattaggacaaagaaagatgcattaatattcctgtactcatgccataaaatatcatggttaaaaaggctttagtacaaagttatccatggtaactcccttcgagggattggattcctttctgcaacatgttgctctgtggccaaccagtttagatataatcaccgccatgtatagagactgcctgctttaaatagctctggcaatttgtaaattgttccttttctgtctcttaaatccacaggattatatataaatataatatttcttccacatgacaaaccttcagctgtgtgtatactatataccctctgagtcttcacatcccaagaccttccggtttttggaagctattcttgtgacctgggttcatggtgcctcgattctggtcattctcttctgaatgggctctggtttttccacatctgttaaagagggctgatgaatgctgagcatagtggaggatctcctaattctatatagtgtatttctattggtgaaaccaaggtgtttttttctagttacatcatacattgtaccttctgtcaaatatagtctttagctttttcatatatgttactaccaagctttttaattttatttgctgatttggatttttggcctgaatttagaactgtgtttttatcctgattagatacagtttaagttccttactcaataaacattcagagaaggcttccctaagtccatggaataggttaggatcccttcccaactttatgtacccagaatactccaaactttcttatttttgtaacattcatcttacttgtaatcagtagttatcatcaacttccctgctaaattggaggcttcttaaggttaggaccttatttattcaatattctttgttattcctactgcctgacaagagtaagtgcttaatacatagtagctgctcaaaaatgtttgttgaattgaattaaatatatgaagtatctatataagccaggcactgtccattgtatctaagaaaaaaatgtaattaattaaatgaacacacagtgaaatttgaactgaatcttcaatactggccaagtgaatgaggcattctgagcatagggaacagtataagtagggatatcagagaaagaaaagtacttagtccatttggggaattaaagttggactaaagtgcacatggatcaaggtacagatgaagctgcagaggcaagcagaagccagttcatcatggccttgtgtaggacatgatacagagtttgacttaagcctctgagtaatggggaactattaaaatattttgagcagggaagaggcacaaacagagttacatttcaaaagatttccccagcagcaacataaaagatagatgagaggggattatgcttttatagggacaacagttagaaagttatcatctaggcaatagatgatgggtagttcatatttaaaaaaggattctttctgtatactatctattgtgtgtaacaaattactccaaaacctagcagctgaaagaaaacaaacattatctcagacagtttctgagggtcaggaatctagggccagcttagcagggtgattctgcttccggatctctcttgagattgaagtcaagctgttgactggggctgaagacttgattgggtctcagggatgtgcctccacattcactcacgcagcaggtggcctctttctggggctgctcacaacatggcttccccaaagcaactgttccgtaagagtgagaaagcaagtgagtaagagcactcccaagatggaagccactgtcttttaaacttaatcttggaagtctcataccatcacttctgctgcgtgctgttggttacttagaccaaccctcgtacattgtgggaggggactgtacaagggtatgaataccagaaagtggggatcatttgggggcatcctagaggctgccttccatgctgcttgtcaaagaatgtaaagagtaagtctacaagtccataatattttgatggcttatggagataagagggcagaacactccacctagaaactatcctattacctagagcaggtaaataaagtcatttgcttgactgaaaggtaagagggttaaaacccaccattctaaatgtcaagtaatagttacgttgcagtcattgcttagttttatactataaattatgatgatttggttccatgtttttttttagtataatgtgattgctgttcagctttatattcagcgcatagcactatgccaagtaatgtacaggtttcaaaagaagactaaaatgtgattcatgccttcagagagttaatttactggaaaacaaggcatacatagatcatagaaaatcttagaccccagagaaaacttaggggagtttaacacaacagcctcatgaaacagctaagaaaacgggttgagggaggtgaatggctgatccagcccagctactgacagagctgagaccagatctcagacctttaggtctgtaggcaagcattttatttaaatataaaatgtaatttgtttacgataccaagaacattcttttttaaatataatgtaaaaaacatttatagagacagggtctcacggtgttgcccaggctggtctcaaactcctgggctcaagcaatcctcctgcctcagcctcttaaagtgctgggattacaagcgtgagccaccacaccaggccaagaacattgtctgaggacttaaatcatttttctatttgaaatcagaatgacttagtatttgatgtggggaaaggcaagacataaatgtgttagaagacatttctgtcttctcttgaaagaccaactcatcctgtcactgattactgtgtgactttgagctaaattacaacacattagtaaatacagaagaaaataatgagcaatgccacatcccttgcattttttaaagcaaggaccaccctaattgacagtgagatctttatattaattttcccatttaaaatagataatattcagtgttcgatgaagaaagaattatggggtagattatgaaataataattggaatactattactgttaatagtaaaaaatgtctgaactatactgttggaataataagagtagaaatgagtaaaattaagtatttacaaggtttaaagtattttggagttttgtttccttttttaaaaacaaaatgctttttaactgttcattgcctatattaccaaatagttttaagttgtacattcaggttcagctccccttttttgagtacccaccatttatgttaagtatattactgggttctttaacagatataattgcatttggtcctcataaagcctatgtgagataaacattttccccattttacagctgagataactgagaaattaagagaaccacaactgaactttctgcatggtcctttgaggtcatttttctgaaaagcaagtgctaacttttaatagtgtctttagcctttccctcaggcaacagcgtatgactaagtcaagacagcagaactaaatacgagtttatgttaccataatttcagagtaacagctactgttttatgttctggtcatctattacataaatatttaatactgagcacataatttggcatgatggcagcaaaaagatgtctatcctggagtttccatgataaaccagaaaggctttttttccccaccagtatgttaaaatatggagaaataaattaggagatggtaagctatagctttcttatcatcttaagtttacctaattaaagcactttaaaataaattcattccatccaaatttagcagccatctattgcaaagtttgcttcctttttccatgacatttaaatatacaaaagccttttttttaaaaaaaaaagcattttttagtaggtaaatgtcagtcactttcttaaactagcctgtcctagaccaacagaccagttctactttcaaaacaaaacatagcatttaatagtaaaaataaactgtcttctcactaatgaatttactgtctgcatttccatagatgtggccatgtgttttcccaggaaaactggcttgaactcaaactaagatagctactaagatccatttagacaaagtgggctataaacatgagaaatcttccgccccctattctgtgtttggttaattttgctgctctcatacattctagcaatgtaccattctgttctcccttttactccagggagcctcatttggcatatagttagtcatacgcatacacctttgaaaacagtcaatgtaactcccagttattaagaacctgatgggtgctaggcattgccttatgaactgagaggtacaaatatgaaaactatataaaagctcctgccccagataaactatgatacagaagaacatttgttagctactttttaggtgctgtgtatcaatcagttttcttagtttcaggtgacagaaactaactctgggtaacttaagtagaatttctaggagggccaaagaatctgacttggaggtacggtaaacaaaaacaaagtcctaaattacaccacagagctggacatagaccatagcttacatcagtgatagtgctgatcctgaactgtacttccagaaccaaagccatggctggcccttgcaactagataccactccttctaggccttctagggccacccttctttccagaagagtctcctttgcagtctggagctggtgcatctgtgtggcagagcctaggccatatgcctgtaccctagttacaaggaagtctgggaaataaattatctggtactttatacacttaactagtaggaggtcagctctatctcacaagataggaggttctgtaaacctaggtatgcagtcaggcactaagtggccaaaaacttctatcagcagcattttgaataatcagagaagattcaacacaggagatgagaaccaggaaacaacaaccaaaaaagaaatatggtgagtttggccttaatatcacaaaaagatgaaaaaacaatgtgttcctaaaccagtttacaaacccacagttagtgaaaggctaggtgatagcttatattctccaaagttataaagtcctaaagaatgtagcctctacttgagacccatttggtctgtgcaggtacaggcactatcatctctctctgtaaagggtcagtatgatgtttaggaaagcagcccacatttggagtcaaagccttttgttcttaccctgcgcagcccttaaccagatgtgtgacctgtaagcaaggagttcagttagtatcctcatctataaaatgagaaggttgaggtaggtgatctttaaagttcccccttggctctaaagttctatactttgtacatgataggccagtgacaactaatgtttttactcaagccgattgtatgttttagaaggcaaataaattatgagcttattttttgatgacagtacattttcataaacccaaaataattaaatctccacctcccacttagtttagttgttttgggttttttaaaacaattttattttcccacacagtacagtttaagcattcaagttgcagcaggggaaatactcattgaatttgtcatcattatttttggcttctatctttatgagagccattttagttttctagtttcagtgatctattttttagattttaagctacaatatattttaacatttgagtattaaattgcatttgtcataatgaattagaaccttacgtttctttcaaaaatagctttatctcaatatgaaatgcaagattattcacatttattataaagaggagaatttttgagacattctatatccactggtcagttactgttttgatttggtgatggaaaatcatagcaaattgtacatttaaagtaaaccaaataaataactttatgcagagatagagattgaagtagccatttggagatgagaattttatctccatgccttcaagaaagaccatatgtaaaccaggtcagaaaaataaaaattacaccatatttattttaataggaccatcttagaatacaagacataacacaagagaatttatttctggaatgacgtgaaggaatttattatacaaactgctccatctaaaacatgttcctaaaatgtaggttcgtagaattttttttttttttcccctggggacatagtttcactctgtcacccaggctggagtgcagtggtgtggtcttggctcactgcaaccttcgcctcccaggttcagtctctcctgagtagctgggattacaggtgcacaccaccatgcctggctaatttttgtattagtagagacgggagtttcaccgtgttggccaggctggtctcaaactcctgacctcaagtgatccactcgcctcagcctcccaaagtgttgggattacaggcgtgagccaccgcacctggctggttccaagaaattctaatatttgttctgtttttaaggagaaaaattattgaacaacttacctctaaactatagtcctttaatgataaacactactgttaaaaaattcttataattaacataatctgatattgttacttaagtctttgaagaaatagagaaaaactggctaacatcccttatgactgcatgtttttatatattaaatagcagtatcgaattgccttccactatctttttcagacgaaataatatatatttaaaccttgcaagccttatccttttttatacttcttttttctagaacagctttattgagttataattcacataccatacatttcacccatttaaaatctataactcagtggtttttagtacaattttagaacatatcaccccaaaagaacccatccccattagcagtgactcctcattcacccctttccccactccagtaatgctgagcatctttttatgtgttactggccatttgtatatcttctttggagaactgtctattcaaaacatttgcccattttttattggataatttatctttttattgaattataaaaattatatcttctaggtacaagtcacttatgagatatatgacttgcaaatatttttactcattctgtgagtttgtcttttcactttcttgagcaagccttatcttgagcaagccttattcttaactctggttaaattttggttttctgaacattttgctaaattttctaaaggtctccagttgtggagtagcctgaaatgaatactttattttttgaaagtggaactaaactctaatttaagtctataatagaaaagagtaattgctataggaaccaacattttttttggttgtttaccctgtgccaagcattgtgctgagtgctttgcaaccctaaaatatagggttgttattcctgttacatagatgaagaaacaaaggcttgaagaagttaagtaagttgcacaaaatcaaaaagtgctaataaatggtcaattggaatgacaatgcaagttattttttttgaccaactttcacattttatgtggggtgtttgtattccactattgtactttttaagacaatattattttacagcctcattttccatccactacaatccctagattttttcaggcatattggaaccgaatcattcacttctgtctctttaaaactggaatttcttggtttctgaaccaagaaatttgatttgatttctatagccttttgattttttgactgtcccttccaaattggccctttttaaacaaattataacaattttcaaagctaaaaaaattctaaaggtaaacttgccattaaaatgattaaatgtaaattgcagaccattttaaatgtctttttgattagctactattaagaatttagctgatctacttcattaaaatgttatattagctcaatgaataattatatatttctgtgtaacaaattacccccaaaactttaatggcttaaagcagcatttgttatttcacagtttctttggtttaggaatccaagtagagtttagcaatgtggttctgctctaggtctctcatgaggtttaagtcaggctgctggctggtgctgcagtctcatttttggggaggatctatgtgcaagctcactcgtatggttgttgggaggattcagttccttttgagcttttggactgagacctgcaattcctcactggctgttggccagagttctccctcagttccttgccatatgcgcctctctatgagacagcacatgacatggcctctggctctgtcacaatagcaacacaagagagtgtccaagatggaagccatagtatctttgtaacctaatctcagagttgatatatcatcacttttcccatattctactcattagaagcaaactattatgttcagcccactctctatagaagggaaataccaagggtatgaacaccaaaatatggagcttactgagggccatcttagaggctgcctgtcacactcagtgaatctattgtttaatcatggagaatccaaaagtcatggtgtttttatatagaacattgatatgtacagttccatcctgcaaacaagtgataattttatctgaaaatatataaggaagtctctccatcctaaaatatgcatatgtgtatatgtattatttttaaagcatctttagtctgcatatacatttgctacttattaatctgttttatcaagagacaacattaaagttgtaagacacaattagaatagaaaattttatgtgtaactttatgttctccccttgacttataaagattgctattgaattttagtattggaaaactttggccaatgtaaagatgattttaatttgaacatgtacaacatgcaaaagaatattttttctccttaaatcatactttagaagtcaaccctaatttaacaaaataggtgatcctgaatggactttaattcatttattcagcaaggcttattgaattactcttctaactcatcatgagttacactcataataaaagtctgcactcctaattttggcctcccatagctcagtcaatctctgtctatgtttccagtttcatttcctattgccatctcccttaaccttccactccagcacagtttttcttgctcctccccatgttgatgctcatgcatgcctcagggcttttccatcttcctgaaaacctcttacccagatcgttacatggctcgcttcacttcatttacttctctgctccagcatcactaccataaagaagcatcccaccagcactcttcacaatacagcagggaccatcaaaaagcaagagacacaataaaaatgatagttgaaaagattaatctcatgacagtgtacaagataacttgtacgtaaacaggctggattagacatggatgagtgggggccacaattaggaactttcacattcattcaggtgtgaattgataatgatccagttatgaccaccttgggcatgagtaaagctacacaaacattctcccaaaaccaggtcttccctcggatttgtgatgccggtaaattgttgccaccttcctccatcctcctctaacagagccatttcagaaccaaaactttttaaagaaaagtttgaaaaaaataagaagcaccaaagaattagcaggaaatggttaggttttaggactagaaaccacaatgcagtaggggctctgcaagaggaaggagtgagtgcttcaaagtgacatagcagctgtgtgctgttgtgcctgagactccttccaatcctagatgtttcctagtggtgctggcaaagcttctgttggctgtaccacattctttcccaatccaactccctctatgtaaagtctcataattctaaggatcctgggttcaaatgtaagtttcttccgtagtagttaccatttgggtgtttctgcttcttctaaactcccttctaattgtttttcctcttgtttttaagctagtgattttttcccctgtattttacatatgcttatggaaagaacagatatgttttcatggcacttagcatgttataaatgcattgttttccatggagtaagatcattctaccactgagagcattaaatccatgttcctaaggtaacccatgttttcctagaaacaggggaagagtcatgaccaactttcacattgtctgctttgttcttggggtatcatccattgtgataaccattcccaagaagtttcctccccaaaacagaattacttctctgcctacccttgattcaagtgacctttcattacagataatctggttttatagggaaatctagtaggttctgcactcagttgtaaagaaagacagatgcaaatgggtttcagtaattggtacaacattgtcacaaagctctttagattagcaagtacttataaactaggtggaatattttttattccatgttgttaataagaatgccctaatcctctttacacacttgaaaatatccagggaatgcagagagagacagacagagagatagactcgtatgtaatcatggacttttgagataggtaggtatagatgttcctgtaaactaagcgtttgtagcctcccaaaatttatatgttgaaatccctaccatactgtgatatggagcctttggtatgaggtcagaggcttcatgcatgggattagtgctctcataaaataggccctggagagcttcctcaccccttctgccatttgaagacacagtgagaagatgaatatctgtgaaccaggaagcaaaccctcaccagacattaaatctgccagtgctttgatctagttcttctcagcctccagactgtgaggaataaatttctggtttttataagccatcctgtctatacagtttgtcacagcagcctgaacagacagagacaagtgtaatcccatcttttccttagctgtattattaggttagtgcaaatgtaattgctgttttcgccattttaatggcaaaaatcacagctacttttgcaccaacataatatttgctcacttttctctgttgtaattttctcatatgagactgtaggaaagaatgatttaatatattctataaagtgcctagtaatataataggtccagcatatgaaagcattcataataggttctcagtaaagagtggcaatgctcgagcatttctaaagaaacggaattgattatattccattcctttttcagacagttataaatgttagaaatttctttctgttactgctccagaatctgtgcttttcaattattggttctaattcagtatttttaggcctcagagaaaaagccttaatgccgtcttcacgtggtaggctaccaggtctttgaagatggccattttgtatcccacatcttctccacatctgctcatagaaatacagtttcttcatttgctcccttatggtttaggttcgaagcaactcagaatggaacacaacgctactggtgtgttaattagcaggtgagaatggaactatcaccttttttgttgtgttcttaacacaaccttagttggcatgaatttgaggagcagttatatttcacctttgacttgtcaaacttacacttgactaaaacctacagatgtttttctttttaattttttttaatttttaatttttgtgggtacatagtaggtgtatatatttatggggtatgtgacatgttttgatacaggtgtgcaacatgaaataattacatcatgaagaatgcagtatccatcccttcaaggatttatccattgagttgcaaacaatccaattattacactctttaagttattttaaaatgttacagatgtttttcaaacatgtctctgttctaccctatctctctcatcatatatttgtatgggattttacattttgacatattaaatttcatcttgttggagtttgctcgttttcttcttacctatgaagctgttttgggaccctaactatgacagtaagtcacttggctatgcacttaatcagcatgtgtttaatatccacactcacatttttataaatatttaacaggaagggaaatttatacctccaaacccactctaatccctgaactccaaatgcatgtaaccaactgcctgttaaatatcttcacttagatgattcctgtcagttcacacttaaccaaactgatttccaccctcaaccttctcctgtagtcttctcatcctagtcacagtgaagcatatccgtccttcacattgcacagccaaaaaccttccttgcagtcatccttgacccattttgtttcctcccacatcccatatctaatccctcagcaaactctacttcacaatgcatcctgagtcatacctttcttacttcttaccttcttgcactaccactttggaccaaatcatcagaaatagattcctaacattttctgtatttacccttacattctttagtctttttaaaatattgacgctagaatgaacctgttaagacttaaattatgtcactcctactaaaaatacaaaaattggccaggtgtggtgaggcatgcctgtagtcagtccctgctactcgggaggctgagttgggagaatcacgtgaacccaggcagcggaggttgcagtaagcagagattgtgccactgcactccagcctgggcgacagagtgagactccctctcagttaaaaaaaaaaaaaaaaaaaaaaatcaccttaatgccttttatctctggttacttcaacaccataattaccataaataattcatctctgttggaatatttgtgtcccattaaaattcgtatgttgaaatctcttcactaatgtaatgatatgaaaatcagcctttatgggggtgattaggtcatgaaggcagagccctcatgaatggaattactgctcttataaaaagacaaaggactttgcagggacgtggatgaagctggaaaccatcattctcagcaaactaacccaggaacagaaaaccgaacactgcatgttctcactcataagtgggagttgaacaatgagaacacacggacacagggaggggaacatcacacatcggggcctttcggggggtgggggacaaggtgagggatagcattaggagaaatacctaatgtagatgacaggttgatgggtgcagcaaaccaccatggcacatgtatacctatgtaacaaacctgcacgttctgcacatgtatcccagaactgaaaagataataaaaaaaaaaatcacgccactcctctgttcagaacttaccagtagctttccatctcactcagagtcaaagctaaagccctgacaattgcctgcacaactctacatggttctgcctccccttcccacacatgtacacaaacacatttgcttttctgacctcattttctagccttctacccttgcttcctcctctgcatgcacagagtcctctttgctgtcccctgaacatgccaggcatactcccaccttagggcctttgcatctactgttcgcctgtctggagtgcactttcttcatcccatgcactatgaatcttccttctgctctcatttttgtttaaggtattatatgagactgtgctactaatagaaattatagggctcttttggctagtgtcaagtatagatttgcgttttggactcacataactgaatatgttagaattacatctaaagaaataattgcctataaatggagtattgtgtgtgaagagttagagtcctgccccatctcctttcctattaaatgatagtgattttcacagtatctgagatagccctttgaatatcagagaaacataagagtgtaaagatttcaaggaaatggtcatatttttcagatgagaaaagttcaccaaagattttacccattggtgccagaaatgtaaggcaggcaagaagttagtagaagaaagtcatcacactgtaacaattattttttttaagttgtaggcactgatttccaaatgagttccataaaccactgctatttccatttgtagtatagcaataggttgtgatactaaccttaaaggtctcaagttcaacagcttattatgaggaaagctgccattcctttaagaaggtgagtttctattatctttttaaagagagaattactcctttataaaaatgtaacttcttcatactgtatttcagatctcttgctttttagtaaaacttttcattgcagtgggtttgataataatagtgctcacttttaaaaaattccctaaattttagtttcccctccagtcaccagctcacttttctgtgatcctctttagcagaactccttaaaagactcatctatacttgctgtttcctccttctctcctgctgttctctctataacccactccaaataggctttcatctcgtcgctccactgaaactacttatcaaagtttccatcaccgtcatgctaccatattatcttctccatcctcatcttattcccagcaacatttgacatcaccttggaacactttatttacgtgatttcactgagacctcctgtctggttttgtttttcatcttatttcattagatgctagttctcagtctcatttgactctttctcttctcccaaaccctatacattgaaatatcccaaggcctagaccctctagtctttggcctaggtgatctttttttatatatgtattttaagttctagggtacatgtgcacaacgtgcaggtttgttacatatgtatacatgtgccatgttggtttgctgcacccattaactcgtcatttatattaggtgatcttattcaatcacatggtatataaattacaatataggctactatgacagaggccccagaatgaaggtgcctaaacaagatgaaagttgatttctttttcctataaaagtgtgggagcttgtccaagactgataggatagcttgttagtactggagacccacgctctttctttcctgcactctgctgttctcaacatgctgtctccatcttctggtcccagatggctgcttcagcccctgcatcctgtcagtattctaaccagcaggaagaagaagataggaagtgagaacgtatcccttccctttaggactcagaagttaaacatgtttcatctgctctcatttcattggccagaactgagtcacatgatgataacttgctgaagagaatttaggaaatatagtctttaggtaggtagctatggcttccagctaaaatggagcagttcttttactagaggaaaaagagcgtgatggattttggaggacagggagcagtttctgctgcacatggctttaaatactatctatgagctaatgtctcccagatttgtagctatttcctgagttcaggactctttcctcagctgcctccctaacattctcgaacacctgcctgttcaaaattgaactcttcacttttctccccaaactcctacccatcttaggtctcccaggtgctcatgccagaaacttagaacagtcttgattccttgccttctctttcatccacttttgatccatctgccaatcctattaactttaccttcaaaatggactccaaatccaaccacttctcatcagatctatcttccacattaccaccaatgacttattttaataaaatacatatccccatcctgtttcttacttccttaaaaccttcctctgtctccttattgcctttgggataaattctaaaccctgtgtgaaccaactctttctatctctctggcctcattttcccattttccacttatattttgtatttcagtactacctagcacaacacacctcatgacttgatgtatttactaatgcttatccctctgtagaatttcccccacctcagacctggctgaagaatcccttagtctcaagtgtcacctccttcagatctttttttttttttttttgagacagagtcttgctctgttgcccaggctgaagtgcagtggcacaatcttggctcactgcaacctccgcctcccgggttcaagcgattcttctgcctcagcctcctgagtagctgggactacaggcatgtgccaccacacccagctaattttttttgtttttttttagtagagacagggtttcaccatgttggccaggatggcctcgatctcttgaccttgtgatccgcccacctcggcctcccaaagtgctgggattacaggcgtgagccaccgtgcctggccagaaaatgttctttgtcatctctccacctccccaggctaggtaggcaccttcctctttattcttgttgtaccatatgcatacccgtatcacacctatcctggatgataccagtttacatagctgcctcttttcctagatgcaagtgccttggtcaggggcaagggcttactcatctctcagtgcccaacacataatagctgctaagtaaatatttatgtaattgaatcatattgatcatgggaacaaactcccattgggagagcatcacctctgccttacatatctgagaaaagcccttgtttattgtaccctatcaactgaatctgctgggctatatattaaagtgggtattttaggccctgcttaaaaaataaaggttaaattgagcatattcattgctctgttaggattacataatgcctgatagtgcaaaaacatggttgttgactgaactttacagttgtctggggtttgtgaggcccagctatagtctaggtagctttgtgtgtttgaaggtattctgactagatgagtcagtagtttaaaagtaacaagtcactgttggtctgtgggagaagttgtgtggacttagacttgccttcactgctttaaaatcttgctttttaaaaaatcccaagaaaggtaggttctctttaaaaagtttatggcctgtatttgctgtcataaaccaacccagttttcagcctttagccgggctccgctcccttagagatgaatggtaacccatataaactacatggcgattctagttgtttttagtcaggaaaagccccaaggtttttattaagaagcccagaaagaagagatgtcaaggattccggtgagaagtactatgttataagaagcagattaggataacttgtcttaaaaatgaaaaagggatgagaaacttgacaagtttttagtgctttcttagcactaaatgatgacttaaagaaagtttagtccttgccaaattttcccctttggaactgtttccactgtgtgatagagatctgccgctacgagcttgtcatcattctcatccactgtcttctttgtcttcttcgaagtcacgtcctactcctcttcctcttatcttctttttttcggcggggtgggggggttttgtttgtttgttttttgcactaagtcatagaactgaaaagactctgggtaatgttttcaaaataaagccacattgtttccaatacaacagctttctctgggttctttcactgcctccttaatgtaagtcttaatcacacttgtattaacagtagaaacactctgcagtatctcgtttcatacagtggtgttagaagcattaactcctcagccctcataccatcacaggaaaacagcaatcattgttaacccccatccattggggagatgaagaaaatgagcaaactatgaagaatgcagtttatttcgtctccataagactgtgaggcagtggaaggtaagggctagaccccaggatggctgattcctagggctcttttcctgtgctccagaatgcagtgacacctttcagttgttgctgtattcagaggtgtgtgttgcatgtgataggtacagtacttgacattattaactcttgcaaccaccctatgggttaggtattaatatccccatgttatagatgaagtctgtgattccaaagcctgatgtctctccactgtgccacacacactgactccacacaataacaattactcccatttcatatcacttgacatcctgaaagtcctccacaaacatcatcatatttaatccttaagaactttggaaatatcagtgattatcacacactttgaaataagcaagtcactaatcaatgtgatcttattaaaatttaagtcagttcatgatgctactactccgaccttccaatcatgtcacatctgtctagaatcaaggcccaaatctgtgtgacctgtgatatggtttggctatgtcctcacccacagcctcatctttttttgtttgtttgtttgtttgttttgagacagagcctcactctgtcacccaggctggagtgcagtggcgcaatcttggttcactgcaacctccgcctccagggttcaagtgattatcctgcctcagcctcccaagtagctgggattacaggcatgcgccgtgacacccggctaatttttgtatttttagtagagacgtggtttcaccatgttggccatgctggtcatgatttcctgacctcgtgatccgcccacctcggcctcccaaaatgtgggaattacaggcatgagctaccacacccagccccaaaacctcatcttgaattataattcccacatgtcaagattgagaccaggtggaggtaattcgatcatgggggctgtttcccccatgcggttctcatgatagtgagtctcacgagatctgatggttttataagcatctggcatttcccctgcttgtactaactcagtcctgcccccttgtgaaaagggtgcctgcttccactttgccttctgccatgattgtaagtttcctgaggcctccccagcaatgtggaactgtgagtcaattaaacctctttcctttataaattacccagtctcaggtatttcttcatagcagtgtgagaacggactaatacaacctgtaaggagagtggtccgctggtttcctctccagcctcatcgcctcctactcttcccttgattctctctgcttcagtcacactggtcaccttactattcctcagatactcagggcacgctcctgcctcagggcctctatacctgctcttccctctatatgtaatgccctctccccagacacctgcttgactagctcccccagttctgccaggtctcgaacaaaaaatcaccttttcacacgcacacaaaaagccatcttgctggtcaggacttgccagaccactctttgcaaaattccagtctagcccctaacatgtcatatccaccttccatgctttagttttatccttagtctttatcattttcaaacatactgtgtatttacttacttctctcgcttaccatctgctcactagaatgtgaatgctgtgagggtagggctttcatctgttttgttgttcacttctccactccagcacctgtaacatactgggcacatagcaggcactcaataaatatttgatgaatgaaaacagattagaaaatagaaagtcaaagaagctaagtgagtttccccaaaatgatatggtatagcagcatcaaagctaaaaccaagactggtcttctgatccacatgcagtttggtgctcagttaggccagaatccgaaaaagttgtaagttaagttctgaaataaaactcagccaaataaagtagtttggtgtaatttgcacttttaaaataatttttcatcagttactatatcatagaggatgaagagcagtccttcccttggactgtctccaagcagcaggaataatgagaataagttacagaacttaaaataaacccaggtgtttctgggcctgagattcttaatgtccacaatgaagggaccatgtcagttcagagctcttcacagctctaatcttgaatccatctcatggatgaatgaaatgcctggttttctttgtaatttgttcagttctatgcatacaaggtatgcagtttgttctgtagataaactacacatgggtatttctgtaactctccttttatcatcattaccgtctgtttgattctttcccctacatttgtgcaaaatgtaggcttgtcatctcactgtgttgtattgcaggatcagcaagcatgtcaaggatctcatgtgtcttctaatctcatgcagcctctgctgcaaggaagctctcaccactgcctcctcagagttatccaatgggcaaagaaaccagaaggcaggacgacttaaggccagggaactaaatatgcaataatggtgtctgggggtcaggaaagcaagtgtttgtacaacatggcctggcattctttgtcactctgaattaaatctgcacatggtaatcagacctaaaagaagtgcaccaataagtcaggccattggttatccagctctatacaagttttggcaaagaaggttaaatgcagtgtttggcattgtatctcatcctggttcatttcttcattaaaaattccctctgtagagagtaaaatacagttattttgaggtggtgtccatatccttaggaacaggaggcaccgtcctaagctcctttacacataccagctcttaaatacacaacttgagtaaggtttataattctcatttctattatatgctgcacatggcttatgataaagtgaacctgcaaatgatagcaagatagaacaagtctgcaaaagtaagaatggcacgttaattacagaagttggatcctatcagtaatttaaaccaaagcatttatttgaaaacaaaatgaaacaaaacaccaatgccctcagtcaccttcttattccattcccatttgctccagtaggaattaatctctttatttctccttacccttgagcacttttatatatctgcacttgggttaaaggcagttctattaatttctttgtttggacagaagtttccttaatttaccataatcatcactgttgtcactatgccagtccagtatgtttggacttcacagataagtcttgcagtttccaaaacaccatcccatccttactgcgtttattcttgaatgacttttcactgggagatagtatacttatctttttcaacaaaactacaaatgggatcctaataacaagtttactgtttgttaatttgtgttagatataggcatactgtcatattttcctgtaatttttcatatctggtcttgtgaactgttactagtatttttcttccatatgtattttacctaccaacttgattgtaaactgcttaaagatagaagctatgttatataagcatttcacgcatgctggctcaatgaatcacaaataattgggaatttggttagacatctcatctgaacagtccctgccctgataccaccctgggacattcagcccttggccacctgctttgatgagcacatttctatgtctcctgcttaagtacttacgtaagatgctactgagtacctgacttcagacctacagagtctgtttttgttttgttttgttttcttttgttttgagacagggtgtcagtctgtcacccaggctgtagtgcggtggctagatctcagctttctgcagcctcaacctcccaagctcaggtgttagcctcctgagtagctgggactacagacacaaaccatcatgcccagctaatttttgtatttttcatagagacaggagtactccatgttgccccagctgctctcgaactcctgggctcaagcagtctgcctgctttggcctcccgaagtgctgggattgcaggcgtcagccactacacctggcccctgcagagtctttatcaaacagaagtgaatattaggaggagcctggggaagaattctctttgatttaccttggtgttaacactccagcgatacaactatggatcctccagaaagactatgtttttgctgtatcagtgccacctattaggaattgttccataaaagagcatgagaaactctctggagttcaaaaagtcaaaatgacatccttgctaaaaaatctctttatggtttgagttccatagttacaaccaggaatctctgggaatttggtctccaagctcttctcagagcatgtgttgcatacattctgcaaagcccttgggggatggagcaggcctagtttttggttttcagcagtgtttgttatcttcacagttaaatggaacactggaatgtgatatttactcaattttgcccatttttcattcagtatttataatttttaatgtggcaggtcttctaaaaaaccaacaaaaaattgctgattttgtgattttagtttctaaaacaaatgaaagcaaaaaacttctcgcccctgaactccatccctggctgttacccttcattctctgttcttactctttcctaagcaagtaagatatgacatttattcatcagagcattttatggttaattcactgttcaattttctaaaataccatttggcttcttacctacagagctatagcaccagaattcactcggtatatgtgtaagaatgactgcttccattttccgagagaaatagaaatagaactaagagcagtgatttccttgtgttaaagaaaaattattcatgacccttgttgaaaacaatagagaagactttattcaagggaggctatgggaacgatacaaggattacggcagtggagtcttgcagtgtgggagagagattgggctggagtctgactctgacaaggacaagtagggatttgtagccaaggagcaaggtgtgggggtcagtagatggaaaattactaagtggaaacaccaatgtaagggagattcttgctagatggactcaacagaattcttgctgaaggcaggccagggtgattagatgtcgagggtaatcagataacaagggtggaggatttttgttaaactttagccggattcttgctcaaactggattctgtaaggacagagagggaagcccagggtcaggcccatttgagcagggggcttatggagatctgattagagttagtttaatgagagtctttgtcacctgctgaaaagaattcgtttttatggctcagaataatagtgtaatcatagcaagagatgacttgtctatgtccattttataataattcaaaaatctcaataatttctgaaaaaaagaagcatttgttatcagagtcataaatgttgctatttatatgcttaagtagtagtatatcagaattcacagaaaggaacaattatttagtgtgcaagatagtatattccaaattatttcatattatagaaataaaaaatattccatagtccttaagccacgcctttttttttttttttttttttttttttttttgagatggagtgttgctcttcttgccgaggctggagtgcaatggcatgatctcagctcactacaacctctgcctcccaagttcaagtgattctcctgtctcagcctcccgagtagctgggattataggtgtgcgccaccacatctggctaattttgtatttttagtagagacagggcttcgccacattggtcaggctggtctcgaactcctgacctcaagtgatccacccccccgtcagcctcccaaagtaccttaagccattccttttgagactctgaagaaagggtacgttcctaatgtttttggtttggattatcagttcatggcagagcagtgccttaattgtacttggtagtgaccactactagttgttcaatcatgaatcctccagtactttttatctgaataatatggagatcctttcttagtactttgttagacagcttttctagatcggtttccaatagtagcgaaagagaaaatcctttatcccatcttttccagaattaatattttctgatcacttcatttgcaagagtaaagtaaatattgaaaataccaaagtgagcttcagtcatttataagaattgtttaaagaaggcagtcatcagttacttttttcacatgattgtattgctgagagtagtatctgcattagtctcttaagcaagactttaaaaaaatcctactgttgtccccacctttatttttgaaagataaacttaaaatttacatttttaaaaatttttaaaaagtaaaattttaaatgactcaacaggtgattagattccatctaaggatgagattgaattcacgatctcagattctcaacatatatttggccttacctattgttaatgaaacttgcctgcaaggagggctgcatgttgcagaacttaaacggagcaataaaactatttataaatccagacacctttatgaggatgtttccttggtttcacttatgtaagccgacaaaacgatcagttgtaaggaactgaaggaagtaaacacttgaatgtactcaaatgtctaggctttgctgaacattatatgattaaaaagcagccaagttcagcgtggactgagaactgctgacaatggagaacatgagacccagaatggcaaataatgtttcagacattgacttctcagactggtctccaccctgtacttaaccccattctcacccttttttggaggggaaaggaattatctagttaaaaactgaatctataggacaacctgtctctcctgaggcagctgacttatgctaattcttgcttagctcagtttcttgagtttagcagaggagatcactgtcacccacaccctctttaaatcagcctcctgtggggccatgtctacacaaccaaggcctcattcattcgtttattccaaaatatatttattgagtgccttctgtgtgccaaggactggggattcagtggtgaataaacagataaaaacacctgtccatagggaactgatattctagtgtgattactgctaggagtgtgtctgagttgaattgaggctcagaagtagatgtgtctgagaggcctcaggagtttggaaatgggggtgtccaacctgtttctttgtcctccaacaggctttattacctgtgcaggtatggtagtaagtctgttttgcatttctttaaggaatacctgaggctgggtaatatataaagaaaagaggtttatttagctcacggttctgcaggctgtacaagaagcatagtgccagcatctgcttctggtgagggcctcaggctgcctctactcacagcagaaggtgaaggggagcctgtgtgtgcagaaatcacatgatgagagaagcagcaagagaaagagggaagatgccagactctttttaacaaccagctcccatgggaactaataaatcaagaactcgctcacccctgagggagaacattaatctcttcatgagagatctgccccatgacccaaatacctcccattaagccccacctccaacattagagatcagattccaacatgagatttggaggggacaaatatccaaatcatagcaggaagagacactccctcctatgaaaacacaaatttgaagaacagttgtcttcagtgttatacaaactgctttctgactgcatataagagaattccgtttatggggttttggtctaaaattatagtgtcatgtcagatctcaatcattttaacttaaggcagttattctagcctttgaatacatttttcccctgaatattcgtggtgttgtgtgacaactatccaaaatattttaagattccattttatcagtaaaacatatgccaggctttttaataggcagagagtaatttggtagtatcattcctcttatcctttaaagttccttcatgctctagaatttaattcagtgattccttgtagaagctagcctgcccaacaccatgggcagagatattgcagagaatgccattttgatactctgagaagaacatgtaattcccatgccttgattttaaatgcaattaaagagccatagtttttcagaagaaagagtactctttggcaaacagtagtcattgcagaggtttggtccttaatctgttttcagggtagttatttcatggttactggatgttatagggacgtgcttctgaacattggtttagtttttatgggtcttgaatttcagattgtgacataaaacagttttctagtacatggtgccagtgttttaatcattagaagccagaaagtaataggccattcctcatgttggctgatgaccccaggctaaacctccaagctgtgtttaggacagtgaatcaggttccagggctagttcactcagccttcaaaatgattttttaccccaacccagtcttctcatgggcccctttgtacacacacctgaagttcacttgttttctgtttttgaggcactaattgtaactacataatcagatgtcagtttggtagtctagaaactctatttgaagaaaatacgtaataattttgttagtcattttctttttaatggtgtttcaagaagtgtttgagatcgatgaaatgatattcttttctatgatctaatgaagaaacctcccacagttgtgggcagcatttttggaaaagagtagccaggtccagtgaaaagcaaatctaataccattagtctttgaactttaatggaattagccagatttcctgaaatagtcctagaagactatcaaaagccctaggggagctaaacttgattgaaaatattataggaacttgaccatatatagcttagacctctgtggcataggctgctaaatttcccaagggagaaatgtcattgggtcacctttcaaagagtcattgttgatggttatgaattcaacagataagcttgaggttgaagagaagtgactttgattgtgttttagggacaaggtcttaacaaagtattgtctaaatttgtatttgaggatattagaaatccagaaaccaccatttctggaactattctgcgatggcactttctcaagttggagccaagaatggttgaattttcagaaagcaaaggatttcttgatgacttgaccagcaagtattagaggacagccttctcattgctgaaggttgtgttctatattttcatcatctgctgggtgccaggcactgtgctagctttgggcatgtagtggtgaacaaaacagatgttctctctgaatttatggagtggatagtctagtaggggtgacacacattattaaataagcaaataagccaaagtttaattacactttgtaacagatactatgaaggaaaagaacagatatgatttgggagtgctattagagttttggtcataggagaagacctgaggaaatgcatttgtttgatgatttaccagtattttaaatgtaatttctggtttcacagaacttgagtaagctgcacaagggaaaaaaactcatcttctgtaattcctcccagtttcttaagccactcagtaaatgctgactacggttttgtggatccattttgtggtgtctgttttcctttaggcaatcctccctctgtctaatttggatacagaatctaaatctttatgagtctgtaatagtacctggccattactggtctataatcagtgctcatataattgttgaatgaattagtgaaggttacaaattgagtgtggtttatcagttaaaagtgctctcccaattatctgatggaaccacaaaccttctcttttcccattatgcccctccttcttaacacaggtgttcccagcattctctccccaagagtaataccctatggccccagggctccatctatctcttttctacatataagtcccaagcctacaggttctagccctgttttctcctgcagagtatcagtccccaccccagtttcttactgcttgccagtcctctccactaaaatgtcctcctggaaactcagacgtgtgtgcaactcttccccctttgcctccttaagtctttagaggtcaccttctcagagagtcctcctctgggccctgcacttaaaactgcaagctactctcccatcccacctcaccccacactcaatccctaatcaacttccatgctttttccccccatagcacttattcatcattctctataacttattttctttattttctgtatccaccctctcactctctttttttataagaattaagctccatgaggacaggatttttttttccgttttgtttactactgtgtccccctgtgcctgtcatgtggtaggaattcactaaatgtttgttgaataaatgaatatttaatgttcaggcattatatatatataatatatcataatgcttctattgcattaggagacagtgaacaagtcagacgcttgcactgatctgtactgtcactgtgaatgtaacaaatacagactgatccaagtgttcctggtggtgactcagatatcaggagtgtctttgaccatagatgatgtgattttctgaaatgatagacaattcttgattgaattcagacaaaaacaatgctcccagcaaagtggaatggtggtgagaaaggattctgaagccatactgcttaggtttgaatctctcctgccatttgccagctgagtggctagtcacgtgatgtctccatgtttcatttcctcatctacaacataggaataataataattcttcctcatttaggagcttgttacaagaattagatgagcagtgtttagcacacagaaacactaagtgtttcttaagtaaattattattcagtagcttcgttcctggaaatttagggtatattaaactcatgtaaaagtactttatatttaaatttaaaacagtgagcttctagactaatttagtaataatcaagtttctttttaacctacgtgaattatatgagatataagacagttgtcatatgggactgtcctgtgtgtcacagaacggccagcatccctgacccctgctcactaaattttagtaatacccttcaatcatcatgaccacttagagtgcctggaaggttggtggtttttacatacactgttctagcgaggcctatacatttgttttgtgacatcattatagatcatctaactagacaagctctccctatctgaatcctcattgcccagtgtccacaatacccttatcacagtgaacaaattctgctatgtcacagctgaatgtgtgctgtctctttttttccctccctgcctttggacacttcccatcctgaatctctcctgtcagaggaactgtttttaatttatttcagcaaaaggaatacgtggtggtggccagaagctctttgccccatgcatgtgttctcccttaagcctccagaaagattcttgagtttggaagcacttaccccatctgcagttttactgttactcactcagcgttcttcccacttataactgaggggctctagttttaccacgctccctgaccagcttcaatttcaccccacctcaatttttgccaggcacttcttaagggagccaaacttcatttctaaaagtattttaacattattcaattaaatggaacatttataaattggttataagggaaaagatcaatattggagttcccatggaaggtttataagaagaagtgggcctcaaagaattaatagaattggactaagtagaaaattagactgggcagaaaagagcaggaaaggagggggtttgtttgtttgccaagcagagggaaaaaatactaacagaaatgcagtgcatggtgtgtagggatggtcaaaaccaggactcagattgaaaattataagtaagaatggcacagtagagttaacttagggaagttcttggaaaccacagtaaaaacatgacattctaccacttccttgttcattgtgttcccgcctcccttgtttttctgtttgtttttgttgaagaggtctctcgtggtccatgagtgagtggatatttatttaccttccatgcctccacacttgtgtaccccacaccccaggggattcaggcacatatacagcagcactacctgtcaccagcctagtttacacagagaaagctacctctttttagggttagtgtttgattctgaatagaaatctcattatttatgcttctttgcaaagtactggtgaagtcttatcactttttaatattaaacttcatgtaaatgttttggatatttaattgtttatgatcaaggtgtctggctagtgtgttagtcatctcccagctaacagtctcttggcaggccatgcttaattcagttattgcatgttaacaggctgttcaaaattccacattgcctagagtttttccacctccaatgtccagacactttttctggcttctccaaccctctgggcattcagaatcatagtttagtgctcatatttgaagccatttagctctttcctttttatttgcctgattaattttgaatttgaattaatcatactttatacccttttcctgactcagttcagtgttcatctcattctgtttactcagaaagcccagaacataagatttgaaccatttgtgcagtgcccaaatgtgtgctgatggaagagtgaacctttaatgttttgactcccgtactatttggttctatttttcctaaataagtcatggtcttttttcattaagtatacatttacaaaaatggttcagtctttgcacataactcagctctcacaattccctaatctaatgttgaccatgttctattttgtcataaaacccatgattttactgctttctctttactagagccctgcatattagcagtgaagacctggtccttaatgaaagtgtggggtccatcctcagtgtctcatatccctgcctgtgttttccttcaggagaccttcctttccttcctatctaagccagagtcttctctgtttccccagttaaaactcgatctgatagtttttattcagactgacaggcaagttgtaggcaacgattgaaggtggctttcttcccaggggtggccagaactcaaagtcttaaagtaaagggtagcaggagcttcatctgccatgattaagaggagttctgggggctctctgctgctcctgggtgcatactatataaacagatgcccagccacccaggggagggacctacaaagatcatgagttaccacgagctgtttccagtttgtcctcctttaattaaaataattagagcctcgtcagtaatgacgagattgcctcactaactgtccaagggtgttagtactaagccacccaaagaacctttttataatgtctcatacagtagaccagagaatgttgctgtgactcctttatcatttatagagatgtggctatgttgggactcctaatggcatgttaccccaaatgctgaactatccagcttgtcactcagaaggagcttcctgacttcagcttcaggcattcacatgctatctggtagagtcgtcttctagcaatgctgatagtttccttggtccagaatttgttaccttcagaagaagagtgtgaggaagagatcccgttctaaagccacctagaccaaacctagcctgagtctccttctggttgggcttaagatgacaatgccattccaaccatggctaggaactcctgagtcttggaatcagatcatagctttacatttccctcaaagcatctgagcttacattcccaggttttccatctcttcttgatatttaaagctttaaaaaaccgcagttatcagtttaaaccataacaggcacgtgggctctaatgacttctgcaggtggtttgggctgtattagagaacctagtcttgatcttaaactgtcatctggattctgagttaatccaggaaaccagtaagaattagtaatgtgtattgcatgtctctgatacatgtgttttccattatttggtcttccacagtgcatgcgcatacacacacacacacgcacacacagcccttcagtttttctaaaatggggagagagggactatggttccaaaaggaaatgactggtgtggtgccttgaaatctgaacttagtcacgtgttgtaaatgaaatgactccaggcacattaacaagatttctttctttcatctcctactttttggaaaaccctttgatgagaaacattggctaacttatagactttcagatttatttctgtaaagataagtaatagccattgcaaagcagccgtacttgtgaaattggagttaagcttccataacagcggtcttaaagaataggtagggttagttaatacacagcagcaaccagctgttcttcctccctgctgagactgggaaagaaggaaattaacttcaactataatggaagagattttcaaaactggtaatgggaaatttatcatcaatgaagactattttaaacattggaacaaatgagtgaccaacagaagtggaggaattatgtattctattggatttaaaatagaatatatcatctgctcaagacacttagaattgatagattagatctgtctaataatttttaactcttgggggtcacagaccccattcagaatctgatggcccctctctccaaaaacatgcacacacaaaactttgcgtatgatttcagggaacttacagactccctgaagtctataaattagacctgaatttaggacaccctggactagatgatctccaaaagtctgttttagctctctaagtgacaagctccacagcatagttgtcccatacataacaatggaatctgaagaccaaatgtcagactttgcattttcttcctccagatttgtaatgcttggcatgctcagtgtcaaagttaaaaaaaaaaaaagtagaatagaaagaattctacgtttaaattcaattctttgtcttggaaaagccaaacatttaattttaaaaatcactggttggctctgtgtcatctttgtagaaaggcagtacagaactaggttgttgccggcagttcttccccagccccacaccccgctctggattcatggatgaaaatgcaaactcagatgccatattaagtactcagaattctcccatgttcacacatctttttactgtattgctgtgattgttcagttgggcttgaaaaatattatttattttctcatcagttttatgtctaagtttcattgactacaagttggaagatgaccacccagaattacaaatcagggagtaatttggtcctctccctaaaataaagagcttttatcctcttaagaagtaggaatggagtatagtctgtgtctgtgtattttaaactcatgataatgagttgccccatatgtagaaagcatgactctatatggttttcccattcccttctgtaaatattctctagcttacctgcaagttctgtagactccctttaattccatgttggaattgtacttgacactttgtgcctggaatcaggaactctggaaataaagatcgcctcaatatggaagggaagtgatctctggaaaagagcataattgtcagatgtctataacttgtcagttttcactgtacctcacactcctaatggcaaacctttaaattcatagttggaagtgtcttaatgaagtcagaaatattactgatgaataggagctaagcgtacttggccagggtctccttaccattcacatggaatgctggtccttttgacagttgtttcttcccattgttgaaggcagggaggaggacttagggattcttctctgtattccccactaaaaagcccttctgttccagttgctccaatcagagtaatacactgcacagaaagcatacaagatatacgatgtctgtggacagatgctctgtggcattattaaccctggcagttgctttagccgttgtttagtcaatggaggttgtttgggagctagaattgggagagaacaggtgatcctggcacccagcccacttgtagctctgcttactgactgagagtccctctgcaccccttgaaagtttactgacagttcacacccttaaagcacatttctgtatttctggggctgaagcttatggcagagatgcacattctgttgaatatttattctttgtgtatattcctgtctgcagagaatgtgatcaatgggcaggactacgaagtgatgatgcagattgactgtcaggtgatggacaccaggatcctccatatcaaaagttcgtcagttcctccttacctccgagatcagcagaggaatcaaaccaacaccttctttggctcccctcccgcagccacagaggcaacccacgttgtcagcaccatccctgagtcattacaatagcaccctgcagctatgctggaaaactgagcgtgggaccctgccagactgaagagcaggtgagcaaaatgctgctttctgccttggtggcaggcagagaactgtctcgtactagaattcaaggaggaaagaagaagaaataaaagaagctgctccatttttcatcatctacccatctatttggaaagcactggaattcagatgcaagagaacaatgtttcttcagtggcaaatgtagccctgcatcctccagtgttacctggtgtagatttttttttctgtacctttctaaacctctcttccctctgtgatggttttgtgtttaaacagtcatcttcttttaaataatatccacctctcctttttgccatttcacttattgattcataaagtgaattttatttaaagctatgccacacatgcatgttcaaatggtttccactgattcgatttttcattcatttaatgcaaacccattctggatattgtgcttatttgagaaaacacatttcaaaaccagaaaagccaaaaacactccaaaaacaagcaaaacaatttggagctttagataaaaggaaaaactcccagttggtaaagtttatctttacttaggatttgtggctcacacctaaacaaagggggtcagggagtgggtacaaatttgagaaaatagaagggtaagggaagggccagtggtggggtttggagagaggagatagctccattaatacacatgtttaaaagatggaaagttcacgcctgtaatcccagcactttgggaggccgaggcgggtggatcacgaggtcaggagatcaagaccatcccggctaaaacggtgaaaccccgtctctactaaaaatacaaaaaattagccgggcgtagtgacgggcgcctgtagtcccagctacttgggaggctgaggcaggagaatggcgtgaacccgggaggcggagcttgcagtgagccgagatcccgccactgcactccagcctgggcgacagagcgagactccgtctcaaaaaaaaaaaaaaaaaaaaaaaaagatggaaagttcgatgtgactgcagtatgagattaaagccacaactattgtttattttggggactctaggccaccaagtattagcacacatacttatgttttctctactaatctggtccaggtcctcatggaccacaggacaaagctttcattttcattcattcttctattgaaattataccaaattcagctgaggaatatggaagtaactttagacttaaacaagacaaaagttttttcactgaagaattgacaagtatttgctccttaaaacaacgcagattagtgaacgtggattcctgctgagggagtgcatcccataatatggcaataattttcagtttctccaacgaaaagatagtgaaggaattaaatcttttgtcctcccatggttaaaaaaaaaaaaaaagctgtgttcatttttactgtactatgcctcttttttcaccatagtagacaattatgtttcatttgatgaattcatagaactggatctcatacagcgatgtcctctctaatgttctacctttcagtttctaaagtgagtcttcctccctctcctacaaaacttttcaattttttgatgtaactcatctacaaatactgtttcttaccccagttgacttgcctttgtcagatttcttcttgttccacactatagcaatcaatttctcttcttccttacaagaaagggaacgagaaattgtagcaacctctcaaggattatatgcagctagttagttttctgcctgtgaaattaggtctggctcctaaataattttaaagaaccatcagcacttctaactctctggacaggtgcctctttgtccaagctagttaaatgctttccaaggaaatcagttcaacttttgtgagcggggaaaagcagggctttattgttgtgttacctgggagtctggagtttgaaaagtgctaattaaccttcctctttttccacattacaaacctttttaagcagcgcagcactccccttagatttggctatcctgggtgattttcagacaagaaccattttctctggggaccattcttctgctgggtgccaaggaatataaggcaaatgcccagaagaccttcaggtgactgggcagtcttatcatgggatatttcttctggccctgccccttcccattctgtaatgtgaattagccacaccagaggctgtgaccatggctagtagacagtggcaacatagtcatccccaagatgctaatcttctgctggaactgtcatacgttatcatggtcaatgtaaacctggtttgtgtggggtgattataaatagagtttccctcctctctgtgacagaatcacaggagaaggacccatctcgtggccttcttgttcttagcgcttcacttttacttcatccctcgattcccagctttttctatcatcattttgccaactcctcagatgcaagactttggttatgtcatactcaccaacgttagtccctctcttccaggtgaaaaggtgggtagcggttgggagggagtctccactgaagagcaggaaggtggtagcagggccggcagctctgccacagagctaggggtgcctgtaaggtgccgcctagagcagcctgggagctttgccttcttttgtctctcactagcccttctactctttgtcattgcctgttcttgagtggatctttgaaatgaggggacaggattctcctaagggtagagtttcaggaaatgagtgaaaggcaattgacaaatgcaaagaagtagtcactttttaaattgctggcaaagctataattaatccctaggcacaattgtagtttttattttaatgtttgtatgcacaaggccctttaggaaatgagaagttgccatgccagattaatttttttttttttttttggtgggattgccttttgggggttgcagccagaaattgtgggtaatgtgtgtatttttttatttattaaattttaaacaggattgtgcaagcttatgagacaattagataaactcatggaggaggcaggtcctcctgttattagatgattttgtgctcttggggctgacaataatacactcttgggaagtgatggtagagactgatgggaatagtctttctgcctggttgcaagtcccaaatttttaagggttaatggaagtaagtggatgtttcctcatgttaactactgaatcagatgttaggagcttgtccctttggggttgacttatgcccagcagtacagggacacagcttcattagagtgttagtgtaaactaactccaaagttaggagttaatgtgaaaggatcatccttgaaacaaatctgctgtttgccatgcttgtagtacagaaacttcacatggagttttgggtgggatttgtgttttcacaagtaaaaaatccctcacgattataaaactcagagcatcatctaatttttttttttaatgactacaagttccagcacaaaactggcatttctttgccatttcttgccagtaagaagttgacacggaggtatttgaaagcaatgttatgtgagtcattcttaagtgttccaagtaagtttagaaacagaaaaggaacttgggattcaaattgatttttcaaatcatttttaaagagacatcatcctgactaaatcttagcctgaaccttcctcccctgtgtgtattccccggtagtcaccgcagcgagatgctggtgagactgccgtggtggcatttagcatcgttaaaactggaaaactctcaagctctttgccactttcctactattttttgattcttgccattttaccaagcttaggttgtgaaacttgacagaaatgtattacaggaaaaacttataattgtatttgactttctaacacattgcaaagtttcaaagtgactttcactttcaacaacatattagaagtaaccacttttgctttcacagcctgaagagttagagcctgatctgatgccccctttcactctgaagtcatgggaaattttccagccatgaaagccctctttccactgcatactgatgggctgactcagcttccttcagccgactgagatcttttcatactattggctatttcataccaattaacctcttaaataagattgtgaattgccaaaattgatagacacttattaccacctgtggactccatattccttaccacaaatgttattttcatcagtcctgagtcattttaacttacagaaattaggattgttgctgctaatatgaataccaattataacttttagaaacaagaataaagcctaaaagagaatgaaatataagaaatgttcgttcccacccctaataacatttggaagtgaatattcccattttcttccacccacagggattgggattgatttttaatttcctaggaaacaatactagactacccaaaaagatgttgccagaatccaaaaggaactatgctcgtaaaagaaatgcagttttctcctacctaaaaaaaagaaagtaaagtgtgttctgttcttatctttttaatgactaagctttaaacagtttattttgggtaagactagaactttcggccatttgttctaatatgtgtgttattagatgcaatagaatttatgaaaagaagaatgacaaaggtatctgattagaaaatttgatcttacgcatgaatccatgtcatggccagccactgtcacatagtgggtgccattctcaacatattggtttgctaactttaagcattagggatttagcacactaaaatacttttaattatattaggtttggtaactaaggagtaaataaatcataatttatcatttgccaaggccaacaaacaacactattgtgctgtttgctctcaatgaagttgaataaaccaggaggcttggcatatcccctttatgttaatcccagctagagattagtaggttgactttcacagcaattgtatattgatccattttaactcatccttgccataatttccaggccagtcaccaggacagaggagatgatggggaaacagagctttagatgaaaactactatgcactactagccttagaggcactggtttcctgttaccactttggcaagtatggatggtctaagtccagtagggcttcatccatggagccattagaactgaggggggagtgttagagatgccatttcaccaggatctttttgctcaggttgtacccatgccaattgaagaacgtgttaaagatgaggaggagagatgtaccattctctcccttaataatgatgttggtttgcaaaacctaaagaaataataacaacagactatttcatactttcaagcaagtctttatactacctgttatttctctaaaattcaaataaagaatttttaaacttaccttgtttattctgtatgtagaaagagagaaaaaagcccccaaatgaatcttcagtgttggggggttagtaatgggaaaggaagcctgaaaaggctttgtggcttgtgttactgttcagatgaaactgttgaactattttccactcttctcccaagcctaattaagtaaaaatttcctttatttaagtgtccagatatttaaactacaatcttatcaaggaaaaaaaaatctaaaaacccatattttatctatgtcttcaggaaagtgggttactcggtcacgcatcttgtcctcaccaaaggcctcttcccagcttgcaatggcaaatgccaccacacctgaagctagtcactgcagactgacagcaagggatccatccaggagtaattaatgcaggcatttactgagcacccaatgattacctctgacactggtttattaactatattatcttatttcaatcgtctctacatcctattttgtaagatggttattaataagtagtggagctggctgggtgcagtggctcacgcctgtaatcctagcactctgggaggccaaggcaggtggatcacctgagctcaggagtttgagaccagcctaagcaaaatggtgaaaccctgtctctacaaaaaatacaaaaattagccaggcatggtggcaggtgcctgtaatcccagctacaagctacatggggagctgaagtgggaggatcacttgaacccaggaggcggaggttgcaatgagccaagatcacatcactgcactcctgcctgggtgacagagtgagaccctgtctcaaaaataaaaattaaaaaatagtggcccaatatttgggcccaggcaattatgtgaattattcaccattatattattccacctgctgatacatagatctggcataagttcatgccctaaaagagctcacagtcagcccatggagccatatacataaattacaaaactacaataacatcagggttctctgagaggcaaaactacatttgtttcagaagatactttaatggacttatttagaaaatgagaccccccccccgccccctcatctaggagaccaacctcaaatcacctctactgcagacaaagttagcagagattggagggtagagggttgaacagcagaaaagagaaatgggaccaaggaatagggctggagactaaagcccccaaggggagtgtcatgaaaagaccccctggtggcaggagggcaaaggacttttacaaactgtgatgctgaaatgcaaatcctcttcattgccccaactcttcagtaaaagcagatacacagttttgtatcaatgttgccttgggagtgagagactgaaggtaggactcaacatgatattactagtgaagaagaagacagcacagcaagataattcatacactgaagtgtcagtggacgtcaggtgaaacagggaaataaaaacttccaaccccccaccccgcccccacaatctttatggcattgtcccctgggacttctcactctatgtgggatatggttcaagccaatttttgaatctcaaagggtaaccacaaatgacatttgggttatataatacatggtatcatagatagagggcctctttagcatttaccctgtaatttacctaactggtccaattttggtagagatttaaatcacttccaatgttttgctcaccataggaaacctatcgcatatttcactccgtcgtattcattcggcatgatctgtgcaaatgcctgaagagaatcgttctcttagttcagttcagagtaggagctgatgcttattgaggacttaaccttccagacatcatgctaagcctttacaagcattagctcatttgaactttgcagcaagccttcatcatcgacataataatacctatgtctgtgaattacagatgaagaaatagtcacaagagattaagtaacttgcccaggatctcacaactagtacatagcagagttgagatttgaaatgaagtctgtcatgattttaaagccacattccttctactatgctacattgtcattcatcctttgaagtcataaagagacaaatgagtgaggaagaaaccaagccacacaacacaggcaaccagggtattgaggcatgttcaggaaagagggagagtcgctaagaggcaaggtccagcagtactcgagggttttctatgagtgactcagaaggcatacactcgatgctggctgcatgcagagcccatgctgggctgctgcaccaattcttctagacctcagtccttgtagtccccatcttggacgagttacccagtggggtggatacaagctggctcctccataattgaagatcctaggctctcctaactctcctactctactcatatccaaaagcccacccaagtgtggcatccagctccatcccaggatgtatccactgttttccctgtgatcacaagttctatagaaagttttcactgcagaattaactgctgatgtggatgctggactatgaaatagagatgcttgtgtaagagatcactaatctgcagacccaaaattgaaatggtttgtttcagaagtgaaggatatatctttaaaataaatacaacacaccatattaataaatggatcatcttgtaagattgagtgcagcagtgtcagtcctaaaagctgtatccatttggaaggcggaccttgcaaggctaacagaaaatactgttgccaattgtttacagtacagcccatatttctgcaaacatcaactgggtacaaaggaagaactgagaacctcaaaagccatctcagatgctccttccctaggtgtcctgcttgacttctgaagcctccgagttatctccatttcctgagcacccaatggagcttcgattcttgggctgcatttcttcatagtgggctagaggcaatggccctggaatttaaacatttgccactagttctaagtgttgtgcgaagctccaacatctaccatggagctgtaggaaaccatacagatgaactagacaacatccttgacatgtcctttacatgtctagacacatgagttatgtctcttccatgggactatgtggtcacccttctgtccccacagaagagtaaagatcatttccaggtgagggtaagatttctggtcagcctgaaaaagaaagttcagttggacacaagctactctcaggagagtttgggggtgggaggttcatggccagcatctttgccatgggcacagatctcacccactcacttggctgctggccccaggacatcaaatgatccatttcgccatattgtctctggtttcctggagttgctggaattcttctctgctaagccattcgttcacatgagatcgacatgttgtccccttccgcctggcaacctttaggaagacggaattacagcaacccccacacatccaactaggctgtctccatcaaatcaccagctagggggaacaggaaattcgtcttaatttagacaatatgagcaggaaagatgctgaaacacttaatctcttgttttaaatgactctacaggtcaccacccaggggagcacaactagaagcacattgcaagtagcagcacggttggggccgattccatcttcccaggatttatcatctggtacaaggcagcagggctcaaatagtccaaggaaggaaaaggccactcatagaaagattgtttttgttgccatagcagcatcttgtacttatcccttcctaactcccatcgcctttgcaattaccaggtaaacatttatcatccctgtgggacagtgagctccagaagagcaggaaccctactaatgtcttgaattcgatttttttcctccaaaagtgctgtggatatagtgtgcttgggacatggtggtttgggcattttaggctaaatcaggatttcgttgaattattgagcatttagaaagccacaaatatacactgtccttccaggagtctgcatgatagactggcatttgtcacactgcactagctaccgcaccctattcagatattcacagggcacagaagttgcagtatgtgcgatgcccagtgctgaggcaggactgcaagggaaaacagcagagatccctgccttcccttaaaagatgaggcatcatttgttttcctcttccccttttcttttcttttttttttttttttgagatgaggtctcgctctgttgcccaggctggagtgcagtggcgcgatctcggctcactgcaagctctgcgtctggggttcacaccattctcctgcctcagcctcccaagcagctgggactacaggcgcccgccaccacgccctgctaattttttgtatttttagtagcaacggggtttcaccatgttagccaagatggtctcgatctcctgacctcatgatccatccgccttggcctcccaaagtgctgggattacaggtgtgagccaccgggcccagccttccccttttcttttcatcctattgctttttcctctggcttcagtctgtggcatattagaaatgggcctggaaagaggatgtaaaccagcgagtctgcaagcggggccctgagactgcagcagcacctcaaaacttgttagaaatgcaacttttctggtcccaacccagacccattgagtcagactccaaggccgggcctagcaccctgtgtttcaacaagttccccagatgactctgagaggggactgagaaacacccgtgtagttccctgtcagcaagactggagaatgggaagatgcagactcctgccagagatgaaccttcccctggctgctgatgttggggtgggtggtaatatcaggatcacctgatgtcaggagttcaagaccagcctggccaacatggtggaaccccgtctctactaaaatactaaaattagccaggcttggtggtgcgcgcctgtaatcccagccacttggtaggctgaggcaagagaattgcttgagcctgggaggcggaggttgcagtgagtggaga

SEQ ID NO: 373 - DNA, 110412 bp, Homo sapiens
gaattttcccccaaatgtttcttcagtgatagggtacagcatgtcaccttctactaatattttttgcctttaaaaaaattttaaaaatagtgcatgccttctgtaaaaagcctctttaaaaacttaatgaatgcatttaaaatccccccaaggttgtgtttttttttttttttttgagacggagtcttgctctgtcacccaggctggagtgcagtggcaggatcttggctcactgcaacctctgccttctgaggttcaagcgattctgcaattcttctgcctcagcctcccgagtagctgggattacaggcgcccgccaccatgccccactaatttttgtgtttttagtagagatagggtttcaccatgttgcccacgctggtcttgaactcctgggctcaagcaatccacccgccttggcttcccaaagtgttgtgattatgggcgtgagccaccgcacccagccaaccccccagggattttaagtggagtgtccctagtgtcccagtgtggtgacgcatccctggcccccttgtttggcatgtgccctgctggaacctctgcaccagcctcggagaggcccaggaacgagtcccctgctacccacacgagcctcctcagtccctgacttccccattctcagtggcctgtgccccatacccagccctctcctgaccagctctgccctcctttcccaggtaccgtatcctgaaccccagtgccatcccggatgacaccttcatggacagcaggaaggccacagagaaactgctgggctcgctggacttggatcacacccagtaccagtttggccacaccaaggtcggggcactgtgggatcagggctggccatggctgtggcggtcacactgggcagggttcatgcggatggttgggggttaccctggctgtctacctctccgcccccaggtgttcttcaaggctgggcttctaggcgtcctggaagagctccgtgaccagcgcctggccaaggtgctgacgctgctgcaggcgcggagccgtggccgcctcatgcgccttgagtaccagcgcctgctgggaggcaggtgggtgtgggaaggaggctggggacagggtgtgtcccctgcctctcagctcccagacccactggctctcccaaccctaacatgctgccctgtagtcagatcagcccctgtggctggttggggcaaggttctgttctgtgtcccccagcctccatttccccacctcaaaaaacggggtacggcacttgcctctccatttcaggacatcagcgtgtggcccggaggggtagcgatggcacccagtgtcttccaagactcttgcgggccgggccccaggcaagatactttctctgcattatcctggttaaagcgctgacggtcctgagaaacaggcgctgtgatggcctccactcagcagaagggtgcccgtgtcagagatccagagctagctggcacgtcagcccaggccgctgactccagagccccgtggcttaacagccctggtgtcttccgggaattgcagaggccaccaggacatggggggctcatgagccccttcactggaggcaggcctgtgggactgtgggcctcccctcaccctcacctataaagcagagctattaggagctactccatgaggctgctgggaaggcaaaacaagtgaactgtgctgagtgtcaccatttgtgacgggcagcactgagccaccttcacagcttggctgcccctccctagggatgcgctgttcaccatccagtggaacatccgtgccttcaatgccgtcaagaactggtcatggatgaagctctttttcaagatgaagccgctgctgcgctcggcgcaggctgaggaggagctggcggccctgcgggcagagctgcgggggttgcgaggggcgctggctgcggccgaggccaagcgccaggaactggaggagacgcacgtcagcatcacccaggagaagaatgacctggccctgcagctgcaggctgtgagtcagggttccccttgtgaccgggcgtccccagccccgagtacccctggctgctctgagggatagtacagcgagacccatggggctcaggccttatgtctctctgttccaaagatgccatgagatgaggcctccatgtcccagcctcaccaccccaaggcctcgtctggcacgtttcctggcactctcccctcgtgccaccttggcctcccgctaaagcagaggaaccccagctccccagctctcccctccctgcaatccctgaaaccaaacagacccatgctctcttctctggttaagggccatgggaacccaggtggcaggtaacagggtgatagccagagagcacagatcaaaggtctggaatctccccaggtccacagagcaagctttcctgccttcggcacatggctttgtgtatcaattgtgtgccaggctcaggctagtgcaggaggaacgttggtgggaagacagagatggccctgtggtcacaaaactcacctgctagtgcaggagactgtgacgcagctggacagtaaggaaatggggggtaaggatacctgagcccttccagggactgcctccaggagcccgtccgtggctgtgcagaggctgctgctgctcaccctgcccctcggaaggcctcagcccaacagcggggcagtgagcagcgggcttccctctcagaacccttgtttgggcctcactctgggccgccccgcacttctaactttcccctcttaatgctctggtgtgtccctctgcgctattgcccttccatgcccaagagcgagtcaagacattcctgagttctcagagcacagccaaactttgctacagaggcagtttcctctccagggcctggcctggtgtctctctgctggtttacctggccctcccccaacctggccccgttccgtgtgccctccaggagcaggacaacctggcagatgccgaggagcgctgccacttgctgatcaagtccaaggtgcagctggaggggaaggtgaaggagctgagtgagcggctggaggatgaggaggaggtgaacgctgacctggccgcccgccggcgcaagctggaggacgagtgcacggagctcaagaaggacattgatgacctgaagctgacactggccaaagctgagaaggagaagcaagccactgagaacaaggtgtgggccgggccagctgtggggaagggccctgagccaggggccagctttggggccaggtggctgcaggtcccaccccggctctgctaagcctctgctttctggccctgggcatgtcactgcctttcctgggcctcagtttctttatctgtcaagtggggttagcagcacttaccccattagggtaggtggtgatgtgtgtaattggcctttactgagcacacgctcctaggccttgcacacggtaggtgtttagcacatgctggcaatcctcatccatcccggagtgcaagccccttgagggcaggaactccatgtccccagctcggcatcccgcaggtgacttctgcccttgagccctcgtgatggcccctgtggttcccagtgctggaggagggactccattacacaggagggaaagtgaggcaggggtaggcagcttaggttctcacaggtgctcactgaggaagccgggactaggaggcagctgccctgagcacatgctaatactgcacatggctggcatctgtggatttctcaccaggccaggtgtggtgctgagcactgcgggtgcatccactcgtgaatcctcattacaaccccatgaggagggtccttccctcaggcagaagcggtggaggctcggagtcaagtgacttgcctgagtcccatagctggaaggggcacttgctctgacctggtgtggtgtggtggccgctcagagtgcggggaagggcgtccccattctggccctggccctggcacaggtgaagaacctgacggaagagatggctgcgctggacgagtcagtggcccggctgaccaaggagaagaaggcgttgcaggaggcccaccaacaggccctgggtgacctgcaggccgaggaggaccgtgtgagcgcgctgaccaaggccaagctccggctggagcaacaggtggaggacgtgagtcagggccaccccgagactgggtggcggggccggggtgccggctggcttgggccatggctgacccctgctgtgcctgctctgcagctggaatgctccctggagcaggagaagaagctgcgcatggacacggagcgggccaagcgcaagctggagggtgacctgaagctgacgcaggagtcggtggctgatgctgctcaagacaagcagcagctggaggagaagctcaagaagtaggtgtggtggggcagcaggtgggggccttctgagcctgcacctggcccttgttcccttctggattcttgtggttcctgcggcattgcagaggttaagggtgggggttgacagatggggcactggggtgcaggggtagtgtcttgccctccctgtactgagggccctagccagggtccagggctgaggcctcagggcccagtgcagcaggtgcatggggtgaggtccctcagggcctgaaggggactggggggcgttatggggtcccaggcgggtgggtgggagttaaggcctgtgctggccacccactctgtggctcccaggaaggactccgagctgagccagctgagcctgcgggtggaagacgagcagctcttgggggcccagatgcagaagaagatcaaggagctgcaggtgcgtggggatcgggtgggtgaggcctggggtcagaggcccacagaggtgacagctgccccacgtgcccaccccaggctcgggcggaggagctggaagaggagctggaggcagagcgggcagcccgggcccgcgtggagaagcagcgtgcagaggcggcgcgggagctggaggagctgagcgagcggctggaggaggcaggcggcgcatccgcggggcagcgcgagggctgccgcaagcgggaggcggagctggggaggctgcggcgggagctggaggaggcggcgctgcggcacgaggccacagtggcggcactgcggcgcaagcaggcggagggcgcggcggagctgggggagcaggtggacagcctgcagcgggtgcggcagaagctggagaaggagaagagtgagctgcgcatggaggtggacgacctggctgccaacgtggagactctgacccgcgccaaggtgtccgtgccttcctcaccccatacccaccctgactttaaaccaatcccgatcccagcagccaatactgttcccacaccagcctccacccagtaccttatcctgagccctgacctcttcacctggtacacaaccctcatttctcagcctcctaccagtcctgaccttaagccgtgactcccaagccctgttccctgactccaggtcatttctgatccagcatctacttccagcctcagacccttgaaccagcagtagttgtgaccctagcccttgactcctgaactctgacttaatacctgtcctctcttcctgtcctgaaccccagcaccctagccttaacccctgacctttctaccacataatcctgacagctgacctctgaccattgtccccaggtgactccgcagctaccatcccaactctcaccctgacccactgccctgggactggcccagccctgtcagttctgacacctgttaagcccagcagtagaatctctttccctgactttgaacttggggctctgctctccctttgattcctgggcccacatctagcttaccagtctctgatcccagatcctgccatctgatgcacaaacttgttctgacatctaactcctgacccctgactcccaacctgggatcctaggccagtgcagagaagctgtgccggacctatgaggatcagctaagcgaggccaagatcaaggtggaggagctgcagcggcagctggcggacgcaagcacgcagcgtgggcgactacagacggaaagcggtgaggctggggctcagctggccacaccaggcagggctttggtgcagccctcaccagcctgacctgtccgctcgcctctttgcctgcaggggagctgagtcgcctgctagaggagaaggagtgtctgatcagtcagctgagccgtggaaaggccctggccgcccaaagcctggaagagttgcggcgccagctagaggaggaaagcaaggtgggctggcaccggtgaccatggagtgggcaggtgggcaccagagccactgggctgcactaacgctgaggtcactggtgtccctgcaggccaagagtgccctggcccacgccgtgcaggctctgcggcacgactgtgacctcctgcgggagcaacacgaggaggaggctgaggcccaggctgagctgcagcggctgctgtccaaggccaatgccgaggtggcccagtggaggagcaagtacgaagcagatgccatccagaggaccgaggagctggaggaggccaagtgagtgctttgctggccaggccactgccatgcagagctttatgcctgtgcctgagccccgctgagggtgggtgaagggagctgctggggctgttctccctccttccatggtccacaccttgtctggttccatggcctagaaaaaagctggcactgcggctgcaggaggcagaggagggcgtggaggctgccaacgccaagtgctcatcgttggagaaggccaagctgcggctacagacagagtcagaggatgtaaccctggagctggagcgggcgacctcagcagctgctgcgctggacaagaagcagcggcacttggaacgggcactggaggaacggcggcggcaggaggaggagatgcagcgggagctggaggcggcacagagggagtcccgtggcctgggcaccgagctcttccggctgcggcacggccacgaggaggcacttgaagccctggagacgctcaagcgggagaacaagaacctgcagggtaggacctgccacacgccagggccagggtgctgccctggggtcggagcaactttgagttatgggggtgccctggtggggccaccctggaatcaggggtgagtggagtgacctgggtgggagtacaagccatgggggtggcctctcagcaccctgtccactgcagaggagatcagcgacctcacagaccaggtgagtctcagtgggaagagcatccaggaactggagaaaaccaagaaggcgctggaaggcgagaagagtgagatccaggctgcactggaggaggcagaggtcaggggctggctgcaggggtgggtggacactgacctgctgctccactggccatcccccccccccaccctaccctgcctgctctgtatccacagggggccctggagctggaggagaccaagacgctgcggatccagctggagctctcccaggtcaaagcagaagtggaccggaagctggcagagaaagacgaggagtgcgctaacctgaggtgtgtccatccttctcccgtccccacctcccgagagcagaaggggagggaagcagtgtgtactctgctctctagtctgtccctcccatgggactttgaggtccgggttgctgtctccattctagctgtgaacctcggagatgctaaaggacttgcccaaagtcacacagtgggggtggagccagtcagtccacctctgtctgcctgggcctcactcttgtccatgaacttgctctgatgggccacaggcagtcacaagagactttaaatcggggaggggtgactcatttgttctcaaaatgggttcgtttccaacggtccttgggcatttgtaaggacaggtatgcccttacgagaccccctttcatgccaccctcctcccataggcgcaaccaccagcgagctgtggagtccctgcaggcctccctggatgcagagacacgggcccgcaatgaggcgctgcggctcaagaagaagatggagggtgacctcaacgacctggagctgcagctgggccatgccacccgtcaggccacagaggcccaggctgccacgcggctgatgcaggcacagctcaaggaggagcaggcagggcgggacgaggagcagcggctggcagctgagctccacgagcaggcgcaggctctggagcgccgggcctcgctgctggctgcggagctggaggagctgcgggctgccctggagcagggcgagcgcagccggcgactggcagagcaggagcttttggaggccaccgagcgcctcaaccttctgcattcgcaggtggggacaggagtccctggggacagagcaggtgcaggcctgctggctggctggctctgagactcctcttcccctcagaacacaggcctcctaaaccagaagaagaagctggaggcggacttggcccagctgagcggggaggtggaggaggctgcacaggagaggcgggaggctgaggagaaggccaaaaaggccatcactgatgtgaggctgggcaagggctgtggggagcctgggacagaattgcagagggacttccctgaggctgggcacctgaccagctcctcctccccaacaggcggccatgatggccgaggagctgaagaaggagcaggacacaagtgcacacctggaacggatgaagaagacgctggagcagacggtgcgcgagctccaggcccgccttgaggaggcagaacaggccgccctccgtggcgggaagaagcaggtgcagaagctggaggccaaggtgtgtgcagcccctctagtccttggcgcaggcagggtgggtgacccaggggtgggcttggcatcaggctgtccccctgcctgcaggtacgggagctggaggctgagcttgatgcagagcagaagaagcacgccgaggcccttaagggcgtgcgcaagcatgagcgccgtgtcaaggagctcgcataccaggtgggcgacagggtctccctggggagtggccctggagctggcccagcccaagcaagccctgagtcccccttgcccgcccaggccgaggaggacaggaagaacctggctcgcatgcaggacctggtggacaagctgcagagcaaggtcaagagctacaagcgccagtttgaggaggcggtgagtgcgctggggcctggacacctggaccgggcaccccagctctgccccagggtctgtggccaggtgaggcatcagcagcagctccaccctccaaggtcagtgacccagagggaagagagaagcttctaacatctctggggagatcagacctagctccttctcatggaacagaccccatgtgctttcccctggccaaggctggggctgcctctgaggggtggggcaggcacaaaaaggcacatgaagttggtgcgtcccaacttccttattcccgctgtggtattggtgaggatggacagtggcaataggaacaaagttgagaaccaggaggagctagctcccttcttggactggggcagggaccagaataagcatctcagtcacccaagcggaaccaaggccctgtgtgtgcccccaggagcagcaggccaacaccaacctggccaagtatcgcaaggcccagcacgagctggatgatgcggaggagcgggcagacatggcggaaacccaggccaacaagctgcgggcacggacccgggacgccctgggccccaaggtgaggagtggcaggggcattgctctctgtgcagggggactgtgggggctgacaggtagtactgctcactcagctatccctttctcctcagcacaaggagtgacggcctgaccccctgggctctaaagaggaatgtctgctgttgcacatctggctgaggccacctgccccgatcctgccatctctgcatcgccccctgctgccttcagccttccctgggccctgaataaacaccacagccagtttccttctcattcttttctttggggttcaggaggaaaaacacagtcctagggacaaaagccaggtccacagcagtcatttttaaaataaagttatttaatagtctccatttaattggtttatttgctgttaataaattggcaacacaaggaagggccccatgtccaggctcaggcaggagcggctgcctcaggcagaggcagggcaggcacagctgccccgtgccccaagggatggagggaaaggcccctcacttctgggagaacccccttggatgaacacagcggccaatgagcaaacagaaccagaggagctacaggaaaatgaggcagaggggcaggcttgggggaaggcagcattctctggtacccaccacccctgcccagggctcagaagcctttgcctgggtccaaaggccagggacaagggaggcttggctcacagatggggggtgggggtcacccatatcttcctccccactctgggactgactgacagccaagaaaccggcaggagctcacacagagctaatgctaaatgtcctcttacctctgggtggccctgggccccagggttctgaaggaaaggtgggcatggtaccctgtcctcattatggggactgaggctctccatgacctagggccctcagacccagggggaccaagggcttctaggacttccctcccaccaagcctgtacccaaagacctggggcaggcagagagcagcagggaggaacgggaacagggcagggcgtgtggcatcgtacccacgctcacccacactggcccagcagcctcccgaggcctggcccaaggtcactcctcagtgaagtccctgtctatgtccatgtagggctcctcaatgtagctaacgagagcagagggtgactgccggtccgggttcaacaggatggacactgtctccttccagtatgagaagctgatgcaggagctctgggcaaagagggaggggctggggggcgcctggaggacccaggtcaagcccagcaccgggacacccctctgagaggccctgggtccgcggcccacccatcacccccttgagggtggggcactcacgttctctaggcaggtgctgtccttgtccttgtgcaggtagtgctgctgccagaagcgcagcaggttgtggaagttgttgagcaggaagccggggtacttcttgctgtgctccatccgctgcagcagccgcaggtacaggggcagccgctctttccgtcgggccagcatcaggatcaccaggctggtgttgaggcagctgacgttctcctgcaaggccacaggcccacagggtcaggggctggtgggagccccagtggcccctggtgaacctgggtagccatcaggcagggaggagagtggccccaggcctcgggccacccacagagctctccctgcacagaggtgagataggactgggggaagggggcccccagcagccccagtttcctgactgagcaccttcctcttccccacgcccacctcccaccccacctgaggcaacaacacctgtccctgtccagacctgggctcaagcatcactccttccggaaggtccgtcccaggcagggctgggtgcgtgtgttggggcggttatcccgcttcagaagtgccattcagcactagcctgcgcgcctcggtggggaaagagttctgccccactcaccatgcactcccacctggtgcttcacctcagaacggaaccaaagaccacctctgagaggtgctaagatcaccctcactctagaaaagaggggcaggaggctcagagaagggaaggctgcatgactattcagtgagggagttgggcagcctcaggtccgattccaaagcccagcagggcagaaggtgtgagggacgtggacatgggggaggcggggagagcactggcctgcaagtcagcctgtgacctgagggcacttgcgagccctccttccttaggccctgtctgtacaatgggacactgattcctcctgagcacagtcctcagaagagctgggtctccagagacgcacttctggagtgggggacagaaacctgctgggcaccaggacaaaggaagtggtttccaatcgaccttccctgctgtgtgtctgccggggcctctcacctgggtcagcgtctgcacgtggatgatgttgatgaggcggaagaggaaggacatctgcgtgggcacctgggatatgtaggcgagcaggcggcattcagacagtacctcggcaactgtggagggaggcaggggtgcagcaggtcaggcttaggcccagtggctgggtcgcccaggcctttcgtggagccccgcttgggtcctgactctgaagctaggagctcatcatcaaaacagcttcaacgaaagctgactgtggcagaaagaaggacctccagctgtcctgctaccaggcaaagccatgttctcagagtgcccaggagcaccccacctcatcctccagaaccaagctcagggcagctctccctcagccctccccagactggctccagacccgtgccctccatatcacacacagaagagttccctccacaggaagatggatccatgacgctgcattaagaaaaacaacgcaaaagttccactccttctgcagaggtcctagcgcaactggttttccacaccagctctcaggtgagtccggcccagtgctgagaccacaaggcacaggttctgctccgtccactagtgtcggagcaactgcttcccgcacaactgggaggcagggcaataaccgaaggtaccaaaatctgtgtggctgttcccctgaaacagaccctctggggcagaaaaaggaagcaaacggctaaattaccaacaaccgggatacttcttgctatcaatgacagtgaccgtgacaaggaacaagtgcctgactttttgggggtgtgggggggtcacaaaccctcaggagaatctgctggatgccacaagccctctcctaggaaaaaaaggaaacgcgtgcgcatacacatggaagtgcgttagcaagtccaggagggttcagatgcctgctgcaccacagggcacctgcgatgccacgcacagcacactgaggacgagggggccaactcatcgtgccaggcaataccagcccagaagaggaaggtctttttctggttttctttgcatcttgctagcaacaatggattttcaccttattaaagtgttgaacaaggcagcaaagccaattgccctggaagccgccaccttgaggccggccacgtgggcatctggtgcagctccctcagtcattcttgtctccctgctggagacagggtgtctgatgccagcattcttaccctgcatgacttgccttgacagcctgcctttcatgtacctttcatatccacctggttttcaaatcggtccagggacagagtgacacagcgcaccagcatgttggagtccaccagggagctgttgatctgcttcaggaatacctggaactatacagaaaccaagctcacagcaggcagtgggctgctggccaggtatggccatggcccggggggatagtcactacaaggggcatcagcgacctctaccagccccactgcttcagataggaagacagaggctcagataagctgagggacctcccctcaccacccaggtactaagaggcactccccggaattcagcacagatccgacactctctccagtggttttacgctcaagggtgctggattcctttaatttttacttttaattttacttcagctagcctgagctgggtttctgtcacacacactcggtgagcctaacacaccaggcccagtccctccctacagcggctcccaccgtggcacccaccatgctgcgtcacggcaggcgcacaagccacccattcccaccctcactccctacccacaagcagccccggttttcatccctgcattcccagggtctagcacaaagccagacagagcaggttccaatgaatgtttgccaaagactgcccagactcccccgtcgtctctaacgtaaaacctgtgcctaaagcctggcagaccaggactccaggtgaacttctggacaacccagcacactccacagagccctgggttaactttacctttgcatcggtgttgatatatttattgaatctcttgaatgcatcaacgttgaacttcatcagctcccccaggaggtcaaagtaactctggagcacatcccttgacttacactcgctgtccacaatgcagtaaaggatgtgctgggtgaggagggacagggtgaaggtgtcaacgtggctgcccccaccagggcctggcatggagctcagaccatgcattggctttgagcaagcatcctggggatggaactggcaacactgtctagattcttgtctgaggatgctggtggctccaaggacaggaccaggcctgacagacctcaccaggaggtggagcagactgggaatgcagcacaatctctcccctgcccagggcgtacagctgaagcctgtgacctgctctgtggtcaccaagatggccggggtgctcagctcctaggtgaggggagctgtcatcaccaggtctaaaacacaggccactgcctaagcactgaggtcattcaagtaaatgaaggacagaatttaaaagcaaaggacacattttgaccccatggtttgtctttgtgtttatgaacgaaattgtttaaatagagtttacaccaaaatactgagttttcatcaagagaataaagccaatttactcctttataaagttttctacattttcttgaagttacattgatttggatcaattcttttccacatggattttataattcgtgggtcagtttcttgtccatatgaaaaaatctgaaagaccaattataactttggccattctgctctaagttttactttttctgaagaccattattcaataaaggaaaattaacttttagtacaaaatatcttcagggtcaaaatgccttgctgggtaaccaaactgtcaccctcctgcatggcctggccaccctctaaacctgtcaccccgtaagcacccatggggaacccacagttggaaacccagggcaaaatctaaggcagcctgcacaggcatttggaagtcacgagatctgctctgctcctgatgaactgtttggggctcaggacaggacacagcaacgcgtgggctggggggagacggaacccaagacactggctgctccagatcatacctccaagaggcctcgcttcagcaggaacatctggtctgcataggaggtggtccctcggaggaaactctccacagcccgagcttgccaaaacctgcgacccaaatactggctcaggtggctaaggctgccctcttccggcccatgttcagttctccaaggggttgggagatgtttgttgccttttcatgtactcaacatttactgaacatctaccaagcatcaggcttcatcctgggcctggggacacagcagtgcccccatcctcacagagagccagctcagtggagaagtcttctatctgggtctgtctggaaggggctgtgtcacagaaagggtaacatctgggatcgaagggctggctcctgcgagcccccgtgaaacatactctaggccttgccctttcacaagaatgggaggacgtgcaattgaggggccaggaatgtgtgtgggaagcggacgaacacatgcagacaggccactgggctcacagacgatgggctggcctagggaagtagtggttgatgctgaccgagggacccagagggcacagcgggtatccacgacagggagtttggacaaggcactgaagtgacaaaggcccatgtgggcatgaagcctcctgacagctcacgcccggccctgatggaactctacctgtccactgacttcaagactcatcttagatgtatctaaggacctcagagaaggtctccctgtattcacccagcccccagccctagcagcggaagaggctttcctttgctgctatagctcctgggccaaccctggctccattccttcccacactgcattgaaacagcacagctctagggaattcatggcagggcccgtatcctagttctctcccacccataaggcaccagcacagaacaggtgcttggtgaatgctcggtcactgtgggctgcagaagaagctctcacatacctgtcgagtcaaaactacacaagatggcagtcaaaccacctctccccaacagtaattgtgcttcaggaggcatggacgctggtgactaaaggaggtattcctaacctcctgagaaacacctggctctgcagccccgcagaatcggcaggtacttttccccagactcacctgaaagacgactctgctggctccttcttcatgacctgcagcagacgagttaataagcccctcttcccatcacacaccaaactcctgaaatagaagagagatattggtgacagatctgagaggctgacaggggccctggggatgggtcattctgctggcttaggcggtgaaaaaccatggggacatttccaagtctgcaggatgccttcctgctccaactgggtccagagccccggagacccctgcagccacagaattaaactgccaagtgcattcccaccacatctcaggccagctttccttcccaggccagaaacatatccagaatcagacatggcttagaactgccagaggagagctgtttataccaaaagtgtgttgaaacaggtcatgccagtctgccagatggggaaagactctgccaatagggtgaggcccagcgtactccgtgcctgaggttcacttccagctggccttgggcaagtgtccacaactccaagcctcagcttcccagtctatgaagcaaaggcaggagatgaggaaatgactctggccccgtcatgggggaaggaagacggccaggcacgcaggggtctgggcccttcaaacagagcagctctgctgtgatccactgcagacatcagggcaggactgggtacaattttatttgaatgaagagttctgctaccttagaaaaaaaagattgggaggccaggagaggtggttcacacctgtaatccctggactttgggaggctcacttgaggccaggagttcgagaccagcctgggcaacatagtgagaccccatctctacaaaaaaaaagtaaaaacactagctgggaatggtggcgcacacctgtagtcccagctactcgggcggctgaggcaggagaatcacttgagctcagaagtttgtggctgcagtgagctataacaccactgctctgcagcctgagagaaagagcaagaccttgtgtctaaaaaacaaaacaaaacaaacaaacaaaaaaggttgggaaatcatggctcttgttggataaagtccactgtattctgacgcctgtgagactagccccccactgcctggctccaggtgaggcaaacctaacccaggtaatgcaacctaacacttggcagcaggtaagaggcttctgtctgtcctgcttggctgcagatgccaccaggcaagaaaggagcacataagcaaaggggctgaatgcacgagacaaggcggtggggcagtgcggagcacacatgacttctggcaggtgacctctctgaggctcacctcatctgtcaagtgcaggtactgatggggctcccctcctagggctgctgtgaggctccaatgagaaaatgcaggtgacatgaatacaatgcctggcacacaggagccctcaggacactgtagctgcatgtgagagaggacacgcgtgcatacctggatgtgctcaccggtgagcccccggggaacgtgggcagccgggatgggctgagggaaaagctgcacccctgcactcacctgtcggtgttgaggacagcttccacctcagggatgttggccttgagagagatggcactgagttcattcagctcctggttgttgagtaacaagtacttgttcctgaaacaaaatgggttggaggaggtaaaggacaggaactggggctgctgggtcagcaccaggctagtgtagggagtctcctgcccacttcctgtggacagaatctgagaagccaccaggcactttcctctagcacctctcactccagccagcacctgcaggagggaactctgggctctcaggcagtggaatctctccctggccccacccccatccccgacccctgcctgccacattcatcgacaaggccccttccctcagcagctctgggcctttctctttgcctacatttccacttgttttctcaaaggcaccaacacctcaacaggtccaatcacactcaagcctggccctgctgcagcagtcccaccaagcaccacggtcacacatcacacagaggcctggttaactgtgacacttcccccgacttgccatccaggcctgtcactgctgggtcctgtgttcccaggacaccagctccctttactaaaaggtatcccacaggaactgagtcatcacacggtgccaaaagtgatcttcagaatcaggactctgatcctgtcactcccggtgaaaacacttccacagcttcccactgcatttagaacagacatttcctgacttaggaggaggttatgtcctgataaacccatcgtatttgaaaatgccgttaagttgaaaacatattgaggccgggcgcggtggttcacgtctgtaatcccagcactttggaaggtccaggcgggtggatcacgaggtcaggagttcgagaccagcctggccaacgtggcgaaaccccatctctactaaaaatataaaaaattagctgggcgtggtggcacacgcctataatcctagctactcaggaggctgaggtagaattgcttgaacccagaaggtggaggttgcagtgagccaagatcatgccactgcactccagcctgggcaatagagcaagattccgtcttgaaaaaaagaaaaagaaagaaaacacatttaatatatctaacccactgaacctcctagcttagcctagcctacctggaatgtgctcagaacactgacttcagcctacagttggccataatcactggcaacacggcaggcacagcacagagtactggttgtctaccttggtgatcgtgtagctggtcaccatttttcttgaaatacattctgagctgcagctgcagctcagtgcccagcattgcaagagtattgaactgtttatcatgagcccaggaaaagatcaaaattcaaaattctacttctgtaccattgtgaagttgaaaaattctaagtggaccatctgtatataaaatccaggcctgtgactgtgacccacaacaccctgtgactgtgacccacaacgtcctgtgcagcccagcccagagccaagcccacatcactcccatcagctggccacaatggtcttccctcgttcaggggcttctggctagaacacacaccctctcacatgcctgttcactcaattcactacaagctgacacttcaggtcttggctggcaagccacttctgcaggggagagttcctgagtgtcctctggccagtcctggaccctgtcaaatgtctctcacagaccccgttcctctcctcctgaataccatctccacttatcactaatgctcaacggtggaatccttggatgaacaactgtctctgttttcagactctgcccttcatgagagcaggggccatggctgtttgcattcatcctgatatcccacagagtactcagactgaagagtctgatgaaagccagagactcacttcctcagggaaaacagcacagttccataacatatgtggtgccatttttcagaaggttaacatgcttcctggagcccttctatggctttcagccggaaaacctctcacagaggatgggtgcatatgatggaggtgccctggggccacagctgtctccaggcatgttctgttagctcaaatgcaaggtttttaaaatatttaaaccaacatttaaaatcaggacctttcacataaatcttaatttctgcctttgcttggcagaaaaaatcagaagttatgcaacagtgggcccagtttcctgtgcacacgcagctggctggagctgagctcactgaaattcttgttcactaaggtccccacatcacctccccaatgccaaggtcaagggtcagctgctagtcacccccttcctgcactgttttccttacagcagagagtaattttccttgtacattctccatcgaaggttaaaaaataaatgagcgcagaatgtctttcaagaaaaatgggagcacacctccttgtggagggaagaatcctccagctgctcagtaagcagtcggctttgcctgtctgaagttcctgccggcccctgggaatagccacgctgtccactcttgctttagaggggcagtaggttgagaaatccattgattccaaaggtagtaaggggccaacgacttccatactcagttcctggggtggctatgagggttagaagaaagcttggggcagtgcctgccataaggaagtctggaaagacgggaggtccgactgcagtgtcacacctgctaacactgaggggacagtgggcttccaccagctccagggcctcctctcgagctgaggtcagggaccagacaaggagatcgaggccttccgaagacagcccaacaactctccttgcagggacactcttgtacttactcgtggtggtcactgaagctctgaagaagcctcaaaaactgtatcttcaaggtgatgtcctgaaacacatgcacagcctcaatgttaggaccacagccacaaggttccaaaataacacaagcagacactctggtgggagcctgcttctctaagcctctgtcctcatgtaccatgaggacttttctttagttagaaaaccatctgttcacttccacatctgatcaacagcagattaagctaatgtggcccccttcctgctaaaaacatgccatcacactcaataaaaaataaggcggggcgtggtggttacacctgtaatcacagcactttgggaggccgaggcgggcagatcgcttgaggtcaggagcttgagaccagcctgggcaacatggcaaaccctgtctctactaaaaatacaaaaattagccaggcatagttgctgcgcctgtaattctggctactcaggaggctgaggcaggagaatcacttgaacctgggaggcggaagttgcagtgagccgagatcgcaccactgactgcactccagcctgggtgatggagactctgtcccaaaaatccaaccaaccaacaaacaaaacaacacgtgtggggaggagcgggggaagtccataggagttagaaatgaagaaaggaccgaggagtttggaatagtgagccaaggaactgatactcagcagctgtgggcagtgtggagaggtggagacaagacctagtcacactaaggcttgggttttaatgccctgcagggactagacagggtgtcaggtcccagtaaagcctggggagcatgtacacttggtgaaagaagggttagaaaggcctgacccaccagcccagggagcctggctctgccatggtgctgctggtgggtgaagggggccctcccaagagcagcagaaaccctgggctcatacgactggggcagtagggccaagacattaaataagaaaactggccctgggacagctgccagacaaaagcaaaagtgccctgtagaaatgcctccagggctgaggctacacaggtatccaagggggaaactaaccccactgacctcaagtgatctgcccgccttggcctctcaaagtgctgggattacgggtgtgagccaccatgcccgggagcacgtttctataggtggatgaaaattacaataggataaaacagcaaataaggaaaagcaggctgctagctcatgcagtgggcagccccctccctgcctggagtgaaatgagatccccatcacagagattacaaggggaagtggctagagggcctcaggcagaatttttttttttttttttttttgagacacagtctcactctgttgcccaggctggagtgcagtggcgtgatctcagctcactgcaacctctgcctcctgggttcaagcaattctggtggccgctccacagacattacaaaacacgaggcaacactccaccctgaggtctgaagacccaaacacaagcattagtgccccatgagcaatcgaaagagaccttaagaaagtattttaaaaatgattaaaaacagaatatgcagcagaaaaaagatattaacatcatggctaagcagtttccgaattgagccagacagaacatctagaaatgcaaaatatatttgcttgaaattaaaaactcaaatgataaagcagaagacaggtcgctgagggaagtccccagagtgcagtgaagagaagagggccccatggcaccaggccgatggctgggtggcacttttaggtcccagagcactttccttctcatgctggtaggcagggtgccgactagccggggggccaataggggaaagagtattatccttcttttgcaagaaaacagaggctcagagattcagtgattcattcaagctcttccaacaagccttccaatgtcctgttcagagctctctcaaggggactgtgagagacacaagctaaaggagagtgcttgggctcaaaaaaccaaagccacctttttttgtatgagacagtgtctttgctctgtcacccaggccggatgtgcagtggcttgatcttagttcactgcaacctctacctcccgggttcaagtgattctcccacctcagcctcctgagtagcagggattacaggtgccccaccaacatgcctggctaatttttgtatttttagtagagacggggtttcaccatgttggccaggctggtctcgaactcctgacctcaagtgatctgcccgccttggcctttcaaactgctgggattacgggtgtgaccaccacgcccgggagcacggttctataggtggatgaaaattacaataggataaaacagcaaataaggaaaagcaggctgctagctcatgcagtgggcagcccctgcctggagtgaaatgagatccctatcacagagattacaaggggaagttggctagagggcctcaggcaggaactttttttttttttttttttgagacacagtctcactttgttacgcaggctggagtccagtggcgtgatctcagctcactgcaacctctgcctcctgggttcaagcaattctggtgcctcagcctcccgaagagttgggattacaggcacccaacaccatacctggccaatttttgtatttttagtgagagacgcaagtgtctctcacactagtgagacagggtttcaccatgttggccaggctggtctgtaactcttgacctcaagtgatctgcccgctcggcctcccaaagtgctgggattacaggcctgagtcactgtgcccagcctaggaagatcttaaaagggatttctgcataggttggggtggggagtggagttcactcagatcctactccaaggtagcttccaattaggggactataagatatgattttagtttctgctctactcccaaaggaaaaaaggtcaaagggtcagcagcaggtcttgaaacaactactccaagccagtgaggccccatctgtccccgggggtctcctgcttaccgggctacagtcacagttctggttgtgaccatggaggacaagggcagatgctgaatgcttcctccaaatcagtttgtcaaacaaattattaagtccagggatcagcttgaactctgcaatcattctgtgaacctgaatgggataggaaggaaaaagtattaagacaaatgtgcttgaaaaatctagcaaaacctcgtgctcagtacacacgataatgatattcaggacaagtatcagtactgtcagtaaggagggccagggtctgaagaaaacatccgtgtatcccctatgcccagcacacacaaacccactttctaactttgctcattaatgctcacaataatcctacaaggcataatgtccggtagttcctatcacagaagcatgagtttgggattcagagagtcctgcatatgattcaagagtcctttgggatgcaagagtcctgggtttgactcttagctttaccatgtgcaaactttgtaaccttaaacaaattccttaagatttgtctcctcgtattaacatcaaaatgttcctcatgctttgcactaggataaatttcagctgaaagtaagatacaattattaaaaaactctaagatctagaaaaatctctgcaaagaaaaaaaaatgatctaagagttggaaaagcctttctgaaggattataataaacctagaagctcaaaaagaagcttgttgacatcaaccacctaaacctttaaaaattctgtatggcaaaactcaagcaaagtcacaagccaaatatgacaaacagagaacatacattggcaattcatgccacaggcaaagaaattcctctataaggagtcctacaaatgtctctgatttttcactttttcagactgggaaagatgacaaagctttataagaccgtgttggtgacttgggcattgggtacattcacacgctgttggtgggagggcacactggtatgacctgcacagggaagagtgtttggcagtagctctaaaattgcaaatccataatccctttaaaccagcaattccactttaggaatttacactcagacagatccatataaacactaaatgatatatatttacaacactactcactatagcattatttgtaataccccaaaataaattatggtatgccactcaatgggatacaaggcaccagtaaaaaagaatcaaggtattttatatgtcgtgaactgaacaattgccgagagataatactgggaaagcaagtgtgctcatgctgtattactgattgtgtaaaaaaagaggaatacaattcgcctttgtaagcataaaaatgtctctagaaggatacactaataactggtaaaattagctgcttcatggaaccattagaatagaatgtcaaggatcagaggggagagaggcttcacttatactaatttatatcttttaaaacagaactgcaggaatgatttccctgttaaaatttgtttatataacataaggctattactagcccttctcggggctgttgtaaggatcgagtcagaaagcagatgtaaagctctgcacacagcaccagtgctcgcttattgctattttacaagggggagaagttcagcaagaccagcctgggtaaggtcagtgattgcaacggcacctaactcaggtgttcagatcttaagtctgcccctttctagcccactacaggtatgcatttatcttgggagaccagaagctgacaaagacatccctggcagcctccatttccatggacctcttccttcaacatattaggttgtgtaaaagtaattgcgatttttgccactgaaagtaatagaggtgactattctcttcctactagaaatcacagcctctggccagtgttaagactcataagcagcccagaatctgttagactgaggctgatgtaaaatgacacctgttctgccactcaggcctttactaaaacccagcctggatctaccttgccctgcttaactgggggtggggaggtacggctgacatctatggtgttcaccaagccatgtgccttcctgtctcactccaaagggccctaagccaggcccaggtcacacagctataaaatgttccaacaatggcccaaaaaaattcatccagtgcaattgcctcactgcacagactagaaacccaagcttaagagattaggggtgagtcacacagctgggaagagaggggccttctaaggcagacttggacctgaccctgggtctcctaagttcaggccagtgcttaggtttgaggtttctactacatcatttcccttttctcttaacaataccagcttctcggccgggcatggtggctcacgcctgttaatcccagcactttgggaggccaaggcgggcggatcacttgaggccaggagtttcagaccatcctggccaacatgatgaaaccctgtctctactaaaaatacaaaaattagctgggtgtggtggtgtgtgcctataaccccagctacttggagggctgaggcaagaggatcgcttgagctggggaggcagaggttgcagtgagccgaggtcatgtcactgcaccactccagcctgggtggcagagcaagactgtctcaaaaaaagaaaaaaaaaaaaaaaaaaaaaagaaagaaagaaaatagcagcttcttcatgtgtaaaatttgtaaaacaaattttacttgtagaatgcattattcctactctcaggtccagccccgtagcctgctctatagcaggatggtaggcaggtgggcgagatgaagtgccactctaccagaggaggcagcgggtacaggctcaggcatttatctctgcagtcagacagccctgggttcacaagatagctctgtgaccctgggcaacattctttgaacccaagtcccttgatagaaaaggcgatgggggacgatggagctgttgaaaaggctcagtgaggtactgtagaagctactcagggggcactaaaagaaacgactgctatatggatggttttcattagcaccagagggatgaaacttgacagcacatggggagcctttccagtcctgagatttcaatttggccaagattggtctgagaacttggcccaactgctcattaacgaggaggcctctttaaggaggaagccttctgtgaggcctggccaaggaaacccttccccttgctacccagtgtaggcaggatctgggaatccagatcctcacggtgcccggcacacagcagaaacccaggaaatgctgactgtgcaaatgagaacacgctagtgaaacagtggttttggggggccaggatttcaaggtcattagtggtcccttcccaaggaaccagcactgtaatcatacagtttaactcaagaccgcaacaactcatagcaacctggcaacaagaaggctcagggaacagagaactgctgtgagagggcagaaagaggagacagggcagcagagtttaaatcctggctctatccaggcctgtcccctgagcgcacagcccagtttatgccctggctttctcaagaatcgagtgtggggacacagagtcaccacctgttgtgtaacttactaaatacctgaaaattcaaacaactgtgaaagtgcctcgaaaaagtaatagcactcaatgcacagaagctgtccctacaattatttcacatataagcaactgcgaaagtgcctcaaaaaagtaatagcactcaatgcataaaagctgtccctaaaactattattttttattaaaaacatgttccgtattgaaggaagggacaccaatgctgtggctatcaccgtgggatctcatccagtgtcctggttttaaatacaaccatatgctgaggactcccaaagtgatacctccagccttgccatctccccaacaccaggtgtaggtaatcaatccaagtgtcaattctaacacacacctcaaatctaccttgtacaaaacacaactccccatcttcctccctaagcctgctcctccaccccttacctgctagtcttaaccacctcaatacctggcaaatccattctcctacttccttgggcgaaaaaccttgggagtcacccttaactcctctcctcactcttaagttcacatccaaaccatcagcaaatcctatctttcaaaacatatccagaatgcaaccacctcccaccagtcccaccatcaatgtgctggtcctagctgctatcatctcttggccctattatgagggcccctaatggtcgccctattcccttccttgctgtttccagtctttccaaaagcagtcagaggaatgacttctcacttcactcagagtaaaaaccaaagtctttaaaatggcctgtgacagcttgacatgacctggtccctgtgagccctcagccctcctctcctggctgtttgctccaggctgtcccgcgctgcctcactgttccagcaactatgcacactcctccccagggcactgccccctcccacctggtacactctttcattctcttctggacgttttcatcctcacttgtaaaatgggggtaactgcacctctgttgcccagacttgtgacagtccagtgtctgactcagaaagatgtggaaggactgctgagcctccagcctctcctgcccccatgcttggtttcctccctagaagggcgcggtctgcaggaaaaggctacttctcaatagtcttgaggagggccgcactgttccaagccctttttcctccactgtaggttatgggcccctcctcctccgtcttggaactacttcaaggctcagggaaccttgcacatctggagctccctgtacttgcccagttttcctaagcagacacagctctgggctctgtcccactgccctgagcccacatcaggttggcaactcctctagcatgtccacagggccaggcttgccagctttcaactctttagtcttcacctcacagaggcaactgcctgcttctgccctcagcaccaaccaagactgcctagaaacgctccatacagcaaggcacagtgaaaagactcccggttctggaatcagcctggtttccttataggtagaacagaaggagaaatacccctatgctttgccaggctaaagcgagagccattctaacagaaggcccagtggagcacctggcataccatgagcacccgggcagcacctgctccccgtgtcctgagacgctggagaggggcccacctggtttcgctgacgccccatcagcagcacgcagaggacatagagcacttccagtttgtacatgatctcatgcataatcttcattgactggggcagctgggttctggctgacgtgtgaggcaggccattctcctcagaagcccctggaggagggaacacaatggaggctgacacagccaccggagacaggattgagtcacagcttgtgaggaaacacgtttctgcccctcgaacctgctctgaacagacttgtagcatggccattcggctgggccatgagcccaaaacacagactctgaaagctgcaaaactccctccacaatcccaggagccaggtgagcgcagagactcggaaaaatggactctgcaatagttgtgcctcatcaactttaacataaagtaaaaatattcggacacagccaatacagtaacatgacccatccctccctgcttatgcccttctcctgccaccaaccagacccccaggaagtgcccaggcagatgtatgacagcaaattatggggaccgctcttcaagtcgcaaatggccctgcttacttggttcttctgctgagactccatgagggacactgctgaagcccaagagggattctttttgaagaattccccgttttttaaaagaagaaccatctaaatttttctaaggttcaactttctaaagcagactgggtatcacaactgatgctactgatgcagatgaacatattatctacaggcagattttcattttacccaatgtcattactgctaacatcaacagcagctaagtgatatttatgggacacttgatatgtgtcagacttgctggctttatgactttgggccagtcacctcctcactaggccttagactgctctgcagcagacagctagggttactgtgcagactgaatgggaacgtaagagaagcccagcatctgattcttaggaagcccccattcactcctagatcctttctttacttatttacagagtcttgctctgtcacccaggctggagtgcagtggcatgaccttggctcactgcaacttccgcttgctggtttcaagcaagtctcctgcctcagcctcccgagtagctgggactacaggcatgtgccaccacgcccagctaatttttctatttttagtagacatggggtttcaccatgttggccgggctggtcttgaactcctgacctcaagtgatctgcccgcctcagcctcccaaagtgctgggattacaggcgtgagccacggtgcccagcgtagatccctactattttaagagggcattggtcagagtcaggagaggctaggtgatcttagcagagtgacttcccttcagtttcctcattttaaaggtgaacagatgaatcagtaactgccaaggtcctctcaagttcctacaggaactgcttccctagaggccttttgcaaaggcctctatgtgttatagaggagtggttatcagatatattcaggtaaggctcatacagaaaacacagtgatactctttaaagtatcaagacagaagaccctaacttattccgactaggtgtggtggctcatgcctatgatcccaggactttgggaggccgaggcaggtggactgcttgagcctaggagtttgagaccagcctggacaatacagtgagacctcattgctataaaaaaatttaaaaaattagctgggcatggtggcatgcgcctgtagtcccagctactcaagagggagaggtggaaggatcgcttgagcctggaaggtgaaggttgcagtgaaccaacagagatcgtgccactgcactccagcctgggcgacagagctggactgtctcaaaaaaaaaaaaaaaagagagaatctaacttactctatcctacagacttggaactatctttccccgtcatgttaaaatcacaaccttggaagacgacaagctgctgaatgaagtgtgactgagacacagtgtgacacggtagttaagagcactgaccctgaagccagactactgggtttgaaccccattcactagccgggtggtcttcagtaaatcagtggacctctctgtgcttcagtatccatcctcctttgtaaaacagcaatactgacaaccatacctaccccttaatgttgtaaggagtagagggatatactgaaggtgcctggaacatagccccaagtaagcaacatacaattagaaactaaatagaagttaagttctcagaaaactgagtttttctgcgaatgcttgcttgttactttgtattctttttcatctccaagcttttaatgggaactaaacaggcaggaggcaaagacttaggaaaaatttactggagaaatttttaatttaagagattctatctactcatatttattctcctgtaccttgggcaaaaaactatagttactcaatttccatgttagcactccttggcccagcttccagaacagttaagtgtcagctaatctgtgaagtgaacctgaagaactatcacgcagaatcctgcctctgtcgtgcactgctgtgagaccttgcgtgcttggcatcctcggcacccagcccatggtgctctagggagtcctgcagggaaggatgtttatgcaagcagtgggcacagtgtggggcacacaagtcctactgagaaatgaacgtctgcgaagaaagagacagggcagcctgacccctctccaagtcaccaccaacttttggtgcctggcttgcgcaggcctgacaagactttctgtgataaatattttcaagaaacagtctccaaagcaatggccagagcttagcaacaaggtcagtcccaaggatgaggatgggaaaaccagctcacgaggcctgtgctcccctgagtctcttcagctctaccacaccgattggagcggtcaccactctctgtctgcactgcactgttttctgcggacatgcacactcacttttttttttttttaacagctttgaggtacaattcacataccatgcaattcacccatttagttaaccatggtatcgtgatttttaggacattcatagagttgtgcagccattaccacaatcaattttagaatatcttcatcaccccccaaaagcagccttgtactcactaccagtcacttcctatttcccaccaaactccttagctctaggcaaccatgaaactattttccatctctatgcaattgcctgttcaggacacttcatattaatgaactcatgcaatatgccatcttttgtgactgcttctttcacctagtacaatgttttcaaggtttatccatgttgtagcccctatcagcattcccttttattgctgaataatatccgctagtataaatatatcacattctggcttggtacagtggctcaggcctgtaattccggcactttggaagaccaagacgggaagatcatttgagtgcaggagtttgagaccagcttgggcaacacagcaagatcctgtctctttttattacaaaaaataaaaaaattagctgggcgtggtggtgtgcacctgtttccagctactcgggaggctgaggtagaaggatggctgagcctgggaggtcagggctgcaatgagctgtgatcacaccactgcactgtagcctaggtgacagagagagaccgtctcaaaaaaaaaaaaaaaaaaaaaaaaaaaaaattctgtttattcattaatcaggtgacagtcatttgcgttgtttccatattttggctgttatgaatatgctgtgatgaacatacctgaacaaatttttgtgtaacatatattttcatttctcttgggtatatacctgggagtaggatttctaggccctatgacataactgtatgttaaccctttgaggaactgctagactcttttctaaagtggctgcactattctacatgcccactaatagtgactgagggctctgatttctccatattcttgccaacccttattatccaccttttttgatgataaccattctagtgagtatgaagtactatatcattgtggggtttgttttttcctctatcatctagactacttaagtgcagtggcaggatcacagctcactgcagcattgaactctggacccaaacaatcctcccacctcagcctcccaagttgtcaggactatgggcacgtgccaccatgcctggctaaccgaaacaaaatttttttttgtagagatgaggtcttgctctgttgtttgagctggtcttgaacaatcctcctgccttggcctcccaaagtattgggattacaggtgccagccactgtgcctggcctcactgtggttttgatttgcatttccctgacggctaatgatggtgaacatttttcacgtgcttaataattatttatatatcttctttggagaaacatctattcagatcctttgtctatattttgaaatgggtttttttattattgttatgagagttctttatacattctagatacaaatcccttattagatatattatttgcaaagatgtcccaccctgccttacccacaaaaaacgttcttccattctgtgggttctcttttcactttcctcattgtgttttctgaagaacaaaaagttttaattttgatgaagtccaatttattatttatctggttgcttgtgcttcagatgtcattgtgtatgacagctaaattgttaaatccaaggtcatgaagctttatccttatgttttcttctaagggtttcacaggtttagctcttacatttaggtctttgacccttttaattttgtatatgacataaggcaggggatctaacttcattctttcgcatgtggacatcaaatggtcccaataccatttgttgaaaagactactactgtttccaccaatgaatggtcttggtacccactgaaaatcaattgatcataataagcatgagggtttatttctgaactctcaacaatattccattgatcaatatgtctatcctcaggccagcagcatagtgtctcgattgcagctttgtagtaagttttcaagtcaggatgtgagttgtcttaggttgttttttttttttgagacagagtcttgctgtcacccaggctggagtgcagtggcacaatcacaggttactgcagcctcaaactcctgggctcaagctaccctcccacctcagcctcttgagtagctgggactataggtgggtgtcacgaggcttgcctaatttttaaattttttatagagacaggggtctcactatgttacccaggctggcctcaaactcctgaggccaagtgatcttcctgcctcagcctcccaaagtgctgggattacaggcatgagtcactgtacccggcctagttcaagactgtttttgttaatccaagtctcctgcatttccacatgaactttaggatcagctactccatttgtgcaaagtagtcagctgagagttatgacagaaattgtgttgaatctgtaaggctgatctatagatcagaatgggactatcattatcttaacaatattaattttctgattcaaagacatgggatgtctttacatttatttagggtttaatttctttcaatgatgttttagaattctcagagtataagttttacacttaagttcctaagtattttatttttttgatcctattataaataaaattgttttcttaatttttggtttgttgattgctactctatagaaatactactcattttttaatattagccttgtattctgaacctttgttgaacctatttattagtttactggtttttatagtagattccttagatttttctacatataagatcatcccatctgtgaacagtttcactacttttctaatttgcatgcctttaatttctttttcttgcctaactgccctagccagaacctccaatacgatgctgaagagaagtggcaatggcactgccacttccagaaacgatcaggaactcgtcttgttcctgatcttagtggtagaagctttcaattttttgccattaggtatgtcagccatgggtttttgtagatgccctttaacaggctgaggaagttctctcctgagtttttgtttttaccatgaaagggtgttggattttgtcaaatgcttttttgctcctatggaaacgatcatgtggtttttgtcctttattctattaacacagtgtattacataaactgattttcaaatgttgaaccaaacttgcataaatccatttggtcatggtatacaatccttgtatgttgctatacttggtgtgctagtattttgttgaagatttttgcacctataatcataagagatactggtcttgtgatgtctttatctggttttggtatcatgataatatgacctcaaagagtaagttgggaactgttccttcctcttttattttctattagagtctggaaagtattggtgtgaattcttcttgaaacatttggtagaattaaccagtgaagccatgtgggccaggacttttctttgtgggcagtttttcattatttattcaatctcgttgttatacttcaggttttctatttcttcctgagttagctgcaatagtttgtgtcttttaacttgctcatttcatctaggttatttagtttattggcttatattgtttatagtattcccttagagtcctcttactttcttaaggttggttgtaacgtaccttctttcatttctaatttagtaatttgagcctttcttttttggtcagtgtggctaaaagtttgtcaactttgttgatctttttaaagattacctttaaaaaaatcacctttggttttacagattttctctactgtttttctattctctatctcaccagttttcactctaatcctattacttccttttccttttgagatgtttgttctttttccaatgacttaaggtagacgtttaggcaatttagatttatttaaaaatgtaggcatttatagctctaaagttccctctaagcacgctttagctgcatcccataagtttgatatatagtatcattttcatttgtctcaaaatatttccttttttttttttgatggaatctcactctgtcacccaggctgtagtgtgatctcggctcactgcaacctctgcctcgggggttcaagcaattttcctgcctggacctcctgaccttaagcgacccgcctcctcggcctcccaaagggctgggactacaggtgtgagccaccgcgcccggcctcaagacacttcctaattttgtttgtgatctcctgtttgacccactggttatttagaagtatactgcttaatttgcatgtatttattaatttcccaagtttgttatttatttctaactcaccccactgggatttgaggacatacttttgtacagttttaatccttttaaatttgctgaacttttttttaacagcctagcatatggtctgtcctggagaatgttcatgtgcacttgagaagaacgtgcattctgtagtagttgggtggagggttctacagttctctgttagtccttgttggtatacagtgttatttaagtcttctgtttccctgttgatcttctgcttagttttatccattattaaaagtagtatgttaaggtctccagctgttgtttttgaactactgctctcttccaatctgttagtttttgcttcatgtattttttgggggctgtttttggatgcatacatgtttataactgttgtatcttcttgatggtttcaccctgttattatcaaatatccctattttgctctgataacagtttttgttttaaagtctctccagcttttttggctgggtggtggtggctcatgcctgtaatcccagcactttgagaggccaaggcaggcagatcacctgaggccatctgagaccaacctggccaacatgctgaaaccccatctctactaaaaacacacacaaaaatgagctgggcgtgggctccccgcctgtaatcccaactacttgggaggctgaggcatcagaattgcttgaacccgggaggtggaggttgcagtgagctgatcgtgccactgcactccagcctgggtgacagagtgagactctgtccctccaactttttaaaagtacagcctctccagctttctcgtggatgctgcctgcatgatacatctttttctgtcctttactttcaacctattttatctctgaattgaaagtgtgttttctataggctgcatataactggatcttgttttctgatccaatataacaatctgtcttttgaatgaattgttaaatctattcacatttaatgttactattgataaggctggactgacttctgccatttaactttttgttttctgtatgtcttgtgtgtttttttgttcctctatatctcctttagtgtttcttttgattaatattttctagtataacattatatctccttcaattatttctttactatatttcccaagttactttctttttttttttttttttttttttttgagacagagtctcgctctgtcacccaggctggagtgcagtggcgcgatctcggttcactgcaagctccgcctcctgggttcacgccattctcctgcctcagcctccccagcagctgggactacaggcgcccgccaccacgcccagctaatttttttgtatttttagtagagacggggtttcaccacgttagccagggtggtctcgatctcctgacctcgtgatccgcccacctcagactcccaaagtgctgggattacaggcgtgagccaccgcgcccagccccaagttactttcttagaagttgctggctggcgcggtggctcatacccgtaatcccagcactttgggaggccaaggtgggtggaccacctgaggtcaggagatcgagaccagcctgactaacatggagaaaccccgtctctactaaaaatacaaaattagctgggcatggtggcacatgcctgtaatcccagctactagagaggctgaggtaggggaatcacttgaacccaggaggcggaggttgcggggagccaagatggtaccactgcacttcagcctgagtaacaagagcgaaactccatatcaaaaaaaaaaaaaaaaaaagaagttgcttaccacatacatcttaatcttttccagattttttttaaaaattagaaataaatatggaatgcatcaggaatttgcatgtcatccttgcacaggggccatgctaatctctgtactgttccaattttggaatatgtgttgctgaagcaagcattttcggatttattctaacttagagctccattccatcttcattctttttgtgctgtaattgtgcatattgtatctatgtatgttaaaagcccaacaatacttgttctaattgttactttaaataattttatgttagagaaactgagaaaaggaatgaagagcaagtatacatttatggagtttttatatttaccctcttattaccattttggttctcctcaccgattcctagggattcaagttgcaatttggtgtcatgatactccattacaactttggtaccacccgttttctttgtacagttattgcaaaatatgtttccatatgttataggttcaacaatataattagatggtttgtgtaagttttttaactgaagaaaaggagaagaaatatgcatttacacaatctcttacaattacagaattacctttacttaaggtgctctttgtttttcatgtggagtcaaattactgtctgaagtcacctgctttcaacctgaagaacttcctttggtatttctcataagtcggtatgctgcttaatttccagatgtttgtctgttactaatgagttctttcagtttttcttttctaagaatgtttttatttcaacttcatctttgaaacatagttttgtaaaatacaagattcttggttgactgttttctttcagcattctgaatatgtcaccctactgccttctgccttccattattcctgatgagcagtcagccactaatcttattggaatatccttgggcatgatgagccatttttctcttactactttcaagattttcttatctttcaggattttttttttttctttttggaggcagggtctcgctctgtcacccaggctgtgattgcagctcactacagcctcatcctcctgggttgaggtgattgtcccatctcagtctcctgagtagctgggattacaggtgtgcactactacccctggttaactttttttttttttttttttttttttcaaagagatggggttttgccacattccccaggctggtcttgaactcctgagctcaagcaatccacccttcttggcttcctaaagtgcagggattacaggtgtgcgccaacatgccaggcctcagcgtttttattaccatgtgtctgcatgtggatctgagtattccgacttggattctttgggcttcttgaatgtgtgcattaatgatttacattacatttgggagattttcagcattatttctttgataatttttctgttactttatctccttctggtactcccattatgcatatcttggtgtgcttaatagtgccccacattattttaaggccctgttttctttattctttcttccctctgttctttagaatgtttaatctctatcaacctattttgctgagtctttcttctgccagttcatatctactgctgagtctttctagtgattttttcatcttgattattatactacttaaaaaaaagttttttttgagacaaagtctcactttgtcacccaggcgcaactgcagtggcaccatctcagcacactgcaacctctgccccgggttcaatcgattctcatgcctcagcaatccaagtagctgggattccaggtgtgcaccaccatggccatctagcttttgtatttttaatagagatggggtttcgccatgttggcctggctgatgtcaaactcctggcctcaagtgctccgcccacctcagcctcccaaagtgctgggattacaggtgtgcaccaccatggccatctaacctttatatttttaatagagatggggttttgccatgttggcctggccaatcttgaactcctggcctcaaatgctctgcccgcctcagcctcccaaagtgctgggattacaggtgtgagccaccacacctggcctgattattatactactcttcaattctagaacttccactgggctcttttcaaatacttcctatctttttattgttattctctatttaacgacacattatcaaatagtcctttacttcttcaagcatagttttagttctttgatcttttttttttttttttttttttgagacagagtctcgcactgtcgcccaggctgaaatgcagtggcaggatctcggctcactgcaacctctgcctcccaggttctcgccattctcctgcctcaggcctccccagtagctgggactacaggcgcctgccaccacgcccagctaattttttgtatttttagtagagacggggtttcaccgtcttagccaggatagtctcgatctcctgacctcgtgatccgcccgcctcagcctcccaaagtgctgggattacaggtgtgagccaacgcgcccagccctttgatcatatttttaatggctgctgttaaatctggtatctggaccctttcacaggaaatttctgttgcctgctttttcttgtgtataggttacacttcctgttttttgtgtgtatgtctcaatttttgttaaaaactggacattttaggctgggtgtggtagctcacgcctgtaatcctagcactttgggaggccaaggtgggtggattgcctgagctcaggagttcaataccagcaactaggtaaaatcctttctctactaaaatacaaaaaattagccgggtgtggtggcatgcacctgtaaccccagctactcgggaggctgagagagaactgcttgaacatgggagacagaggttgcagtgagccgagattgtgccactgccctccaacctgggcgacaagagactccatctcaaaaaaggacattttaagtaatatactgtagcaactctggatactgattccccctccttcagggtttgttgttgttatttgcttatttattagtttagtgacttggttagactattttcgtaaagtctccttccccaaagactggtgaagattttcatgttgtgcctcagagagtgcaaccttgggcatgtacagagtctccctgggatgacattgagccaggctgtctttgactagctctttccatgatctctctgttaagctttctacctcttctggtatcacatccagctgttaggctctactaactgctgactgaattctcgactgtttttgataatgccctggagtatacactgctccaaagtctaattcaattaaattcaggaaggggtaatttttgaaattgagctttgttctgaccttgggagagttcttctcagctgtctccttccctggttctctggtgaactagctggcctgtagatcaccctgttcttaattaagaagagggtacctggccaggcacagtggctcatgcctataaacctggcactctgggaggccaaggagggtggatcacttgaggccaggagtttgagaccagcctgaccaacatggcaaaacccgtctctattcaaaaaagagaaaatataaaaaataaaagagtaaaggccgggcgcggtggctcacgcctgtaatcccagcactttgggaggccgaggcgggtggatcatgaggtcaggagatcgagaccatcctggctaacaaggtgaaaccccgtctctactaaaaatacaaaaaattagccgggcgcggtggcgggcgcctgtagtcccagctactcgggaggctgaggcaggagaatggcgtgaacccgggaagcggagcttgcagtgagccgagattgcgccactgcagtccgcagtccgacctgggcgacagagcgagactccgtctcaaaaaaaaaaaaaaaaaaaaaaaaaaagagtaaaaaaaaagaagaggtacctctttttatttgcttaccatcaaaatctcctcaggcatgaacttccctggactctgttcttattaactgcctctctctgtgggcaaattctcagagcagggtcagtagcctctagtcttccgggcttgcctctcccagtgtaaaacctctgtacatgagcaagctagggcaaaggtgatcagagccatagaattcttggcctcaagtatgtgggatagagcttccacaccgtgagtacagtatggagctgggtggaggaaggaagcctctgacctctttgccatactcaccgagaacttagtctcttcaatttggagctggagggaagaagaaaagctgatggccccccactcccaatgagaaacctattccttgtttgggagctgagaattcctgggtttgtatattctgaacctgctggccagagtcaaatgctttaaggctgggcacctaaccaaagatgggccagagttctttaccaggaagctggagctgagactgggagtcttcttatttaataggcagtcttctgcctagtcccatcaaggggaccaggaaaaggtagggtacagtgagagagaagactaagaaacactgtagaaagaaaaagagacgaggagagaagtttctaggttcctaagaatgctctggttactggttcttgttagtccctgagacacagctgtctcaggtctgcaacaaagcccttctccctgaaatcaggtccactttggggagttcaatgaagtttctgtaacaagctgtcaaaagagtcttaatagtcatggtctagaattgccttgaggacaattctactctgagcaaatctcaaattaatccttcttggaaagaagagcaagaatggtcccaggcgcccaaggaaaagctcccgatcactcaggggacccatccttccataccttgattgtgctctgactcctcattggccactcgcatcagggcatctagcaccaaagcattgtctagccatgtgtaccactcttccaactcctgaaggaagctggctgtgcccgttgactctgacacctttcgagtcgccagtttgcaaagccgctcaacaaagccaggaatgctgagaagggccgctgccagggaaagaacaagcgaggaaattttcaaaatagagaccagcaaaactacccctaaagccctaacaaacaatctgcatgataggaataattcttactctgatagtagctaaagctactcttttaaaatgaatgtcaaaccaaggtaaatagtaattatgttacaggcataagctcagtttttagcaggtacagggaaacaggctttttatctactgggaatataaattagaataatctttatgccttaaatgtgtgtgtctttgagccaagaggtcaatttctgggaatttaccataacgaaataaccagtcatattacacgagaatatctgtataaggaggttcactgatgtggtttctgtaacagcaaaaaggtgaaggtaactaaatgttcatcaacagctgattaattaaatacaatgacacatttatacaatggaatactgcatagacactaagaatgatgacacatacatctttatatagtgactcaaaacagctgtttacttgttagagagtaaattattaaacaatatgaatttaattttcttcaaaaatttaaatatttgcttcttcaaaatacacaaggaatgaaagcatatataccaaggaatttactgtggctgttcctaagcaggagagaatacaaacaattctcttaaaattactcatctatagtttctaattttcctgtaacatttactagcaggatgaaagataaacatttttttaaggtaaagaaaaaaactgaataatcacccaatttttctttccaccaatctcattttattcacaatgagtgaggtggaaattctgatcggcatattagaacatcataaactttggaggcagggagatccagattcaaatcctgactccatcatttaaccttctttaaaatgagactaatgcctgatcatgtttgcctgtatatgcattaagtctccctggaaggacagaaaagaagccaagagcagtggctgccacagtaaacagccataagatggaaacagccaaaatgtccgtcaagtggaaaaggggatttaggtcactgagagtaacagtggaactgaaacttttcaataaatacctttttgaatccgcagattttttggaaccatgtgaatgttacacctaattaaaaattaataaataactagatatttcaggatatcaagggattactattaatttttgatacagtggcagttacgtttcttaaaagtcgttatcatgtagaaacactgaaatatatgcaggtgaaattatacgatgtctggggtttacttcaaaataacccaaggtgaagtagggtatagtgaatgggagtagagataaagtaagacaagctggccaggcacggtggctcatgcctgtaatcctagcactttgggaggccaaggtgggtggatcacttgaagctaggagtttaagaccagcctggtcaacatggcgaactccatctctaccaataatacaaaaattagccaggcgtggtatcgtgcgcctgtagtcccagctactcaggaggctgaggcatgagaattgcttgaacctgggatgcagaggttgcagtgagctgagactgcaccactgtactccagcctgggcaagagtgatactctgtctcaacgcgtgcgcacacaaacacacacacacacacacacccctcccataattagtgagtggctataagatgatgtttgaccttagttataaaataaaactacattgaggttcctcaaaaagttggccaggcacggtggctcacgcctgtaatcccagcactttgggaggccgaggcgggtggatcacaaggtcaggagatcgagaccatcctggctaacacggtgaaaccccatctctactaagaagtacaaaaaattagctgggcgcggtggcaggcgcctgtagtcccagctacttgggaggctaaggcaggagaatggcgtgaacccaggaggcagagcttgcagtgagcggagatcgcgccactgcactccggcctgggcgaaagagcgagactctgtctcaaaaaaaaaaaaaaaaaaaaaaagtcaaacataaaattaccatatgacccagcaatttcactcctacatatatacccaaaagaattgaaaacaggtgcacacacaaatatgtgtacacacatgttcatagcagcactattcccaacagccaaaagatgaaaatatcccaaatgtccattaactgaagggataaacaaactgtggtatctacatgatgagtattattcagccatataaaggaatgaagtactgacatgctacaacattaatgaaccacaaaaacattatgccaagtgaaagaaaccagattcagaaggccacatgctatatgattccatttacagttatgcactgcattaacgctgttgcggtcaacaacgaccacacagaagacggtggtgccatcagattataatactgtatttttactataccttttttctatgtttagatacacaaatacttaccattatggtacaactgcctactgtatttagtacagaaacatgctgtacaggtttgcagcctaagtgtatcatgggctataccagctaggtttgtgcaagtacactctatgacattcacacaatgacaaaatcacctcactgcatttctcagaaggatagagactgctaagtgacaacatgactgtatatgaagtaatctgaataggtaaatccacagagaaaaaagcagaatggtggttgccagcagttggggagaaggggtaatgggaagaagctgcttaatgtgtacggcgtttccttttggggtgatgaaaacgtgcaactagatagaggtggtagctgcacaacactgtaaatgtactaaatgccgctgagttgttcactttaagacggctaattttatgttacgtgacttccatctccataaaataattacacagaaatagatttttgtttgagacaccatttttttttttaacatatcagcttggcaaatataaaaaagtttgataatgctctgtactgggaaaggctacagacaacacggtggggaagatgaacaagtaatttctttggagggttaatttgtcaacacttaccaatttccattaatgggggactaattaaattacagtatgcctgtataatagaatattatataattacaaaaaggaatcatataattctatatatactagagtgtaatttttggcaagataagtttaataaaaagagagcagcacttattttatattacctatttacattaccatctgtacaaacaggagtcaatctctctctgtccctccctccttcccccgtcccatgattgggcatgtatagaatatttttcgaaggacgtttaagaaactggtaaaaagttaccacagggaggggaacaaactctctgctgtactttttgtatcatttaaaaaaaattttaggtgtgtattattttttctaaaaacaaatcagtaggcggggcatggtggcccatgcctgtaatcccagcactttgggaggccgaggtgggtggatcacctgagtttgggagttcaagaccagcctggccaatatggcaaaaccgatgtctactaaaaatacaaaaaaattagtcgggcctggtggcgcatgcctgtagtcccagctacttcgcagactgaggcacgagaatcgcttgaaccagaaagtggtggttgcagtaagccaagattgtgccactacactccagcctgggcaacatagccagactgtgtctcaaaataaaacaaagcaaaaaaaacaaaaaagaaataaaaagaatttgtattctacatgaaaatcttcacatagctggatttttactcttatacttctgttctcagcaaaaatagctcctgctgcttgacctgctcctctcaggacagcatgtaggagctagtcttccccattcctgcacactcaacacactcctccagatgggaagtgcccggtactcagggttctaagtctgacttcccacctgagattcttgagctgttgtgagtcactcacctcttgaaaagctaataaaagctaagaccttctccccagaaaaaaattcactggaccaatcatacctagcaactcatacacaatctcatgggctgacatcccagcatatccagtccttgtaattctcacagctttatcagtagctaccacacctggctggttaatgttaaactgacaactaaatcactcacaacccctgagaatttctgcagaagcaggcctcttctctcttctcactgttgaaacatcagtattccccccatactcctgtagtttcccctcctgctttccagcttcatgtgctgcataattcagcccctctcagctaagtgtcacttataaattgacaattatctagcctatagcttcatttacatctctgctaagaatcttgaaagacgttactttcccccagaaggaaaccagctgttctcttctaaatcgacagaagaacaactggtagttctgagaatctcaaaaaggactcaaaaaataattatttattttaaaatgaatctcaaaaaataatgacttacgctatcttcctggggctcagataatttacattagataattacatgtaaattatctgagccccaggaagatagtgtaaatcattatttttgctagacaagaaaatgacctcacagccacagtttattaaaaacgaaacgaaaactttttggcaacatcctacatatttcagctttccatacagttatggactgtgtccccaccccccgcgcccccacaaattcatacgttgaagctctagccctaaatatgactgcgttttgaaacaggccctttagggaatgcggtggtgtgatggttaattttagctgtcaacttgactggactatgggatgcctacatggctggcacagcactgtttctgggtgtgtctgtgaaggtgattccagaagagattggtgtatgagtgtgtgaactaagggaaaatctgccctcaatgtgggcaggcaccatccaattggtgggggagcagtgggaggcgatggaggaaaacaaaaagggattctcccccttctggagtgggaagtttttctcctactgctcttggatatcagactccaggatctttggcttttggtctctgagacttgcaccagcagtttctggggtcctccagccggggagctacaccattagctttcctggttctaagttttccggacttggactgagccatgctaatggcttctcaggttctccagcttgcagacggcttatcttttattttatttatttatttttggagacggagtttcactcgttgcccaggctggagtgcaatggcacaatctcagctcactgcaacctctgcctcctgggttcaagcaattctcctgcttcagcctcccaggttgttgggattacaggcgtgtcaccatgcccagctaatttttgtcgcagatggcttatcatgggactcctccgcctgtgatcgtgtgagccaattcccctaacaaatcccacctcataaatcctactgcttctgtctctctggagactgctgcctaatacagggaagtaattaaggttaaatgaggttacaaagtgtggggccctaaaccgagaggactggtgtccttctaagaagaggaagagacaccagagatctccgtctctcctcaatgacagagaggaaaattcatatgtggatacaataaaaaggtggccttctacaagccaggaagaaaggcctcaaccaggaaccaatcctgacagcaccttgatcttggacttctagcctccagaactgtgagaaaaataaatgtctgttagttaagccacctagtctacggtaccttgttatggcagctcaagctgactgatacacacacctgagataaaggcattcactactggagcgcaattcaagaatgataacattcagaggactaagactttcctcatccactcgtgatttaattatgtccaccagcttggccttcccagggcatttgaatggagaaaatcgtgcgggtaagggaatggagtaggaattatggtcagggttgggaagggtcagatcctgcacaacctcatgtgtggaactacaacttttaggctttatcccaaaagctacaagcagaatcacacatagactgtctactaggctagtcacacagatatgaaagtgaatctagattattttatagagactttaagaaaaaactcccaaataaaaaaacaaaaacaaaaactgggctttccgttctcagttaatcaaaaaagcccagctgaccagaacagttcattcctcaagaataatgggtaatgctggttttacttaagtcagtttacaaataggcatctgaaagcaatcaatactaacaggatcaaaatcatctgccagaatagattccttaaatgggaaactaaaagatgaaagttacttagtgcctcggcatacacaggcatccaatacagaacctttctagccctcagtttcctcacatgtgcaatggggatactaatctctattccacagggcacttgaaggattaaataaaatcacttctaggtaaagcagttacccagcgtttgccacataccaggagcttagcaaatactaccttttgtcaatgtatatggaggtgtgtacaccagctctgaggtataatttagttataatgaaagtcactttttttaaaattatactttaagttctagggtacatgtgcacaacgtgcaggtttgttacatatgtatatatgtgccatgttggaaagtcacatattttttaaaaatgtaaatttcctaaaatgagaactcccccaaaatcataaaggagtgggaagaaaaccgtacacagaccaaggaagaccttgtatctagtgacacaggaggaaaagcaaatctagagagagaataaactggggttggagtccacaaacttctacctttacatatgactacaacatgtaaaattatattccctaataacctacaaagtatagttatgatcacctcatgttcctaactaaaactagacaataacagagtgaatggcaggttcatattcagcctcaggagaggaggctgctctgaagcacttgataactctgcagagccagcctggggaatgcacacaactggactttagaaacaaagaactgttttcagagcatgattagggctacctctgcatggtcatggttttctactgctgctttttaatgatacatttgtataattttaccttgtttatttggtgtaccataaggtacacagtgataggtttttgtattaacaatatttccagcctgttaacattgaaaaactagcttttaagacacaagtttcagttcaaatatgaattatctacactcttatgaccaaaatacatctatgccagtttctccaaaatctgtgcaggcaacaacattttagatagaacacagttcttttgctactgaacagaaataggtgggctagattggttagaatagtgttttgtttttaagtaatatatttacacggttctaaaatcaaacaatatatgaaagtatacagtaaggagtcccactcccactgctactaccttcccttaccagctacttcctattaataaccactttatgtttcttgtgtaccctttgtttctttaggcataccatatatgtgggcaaacgtatggtcttattctccccctgacttaatacaaaaactataccatatacacactgttctgtattttcctctttatcattaatatatcttggagatttttctatagcagtacatagagatcttcattttttcaaagctacacaattttccattatataaatattgaatacactaagcagtccagtgttaatgaacatctgggtttctagtcttttgttattacaaataatgttgcaatgaataatttttttttttttttttgagacggagtctaattatgtcgcccaggctgaagtgcagtggtgcaatctgggctcacagcaacctctgcctcctgggttcaagcaattatcctgcctcagccttctgagtaactgggactacaggcgtgcaccaccacacccagctaatttttgtatttttagtagagatggggtttcgccatgttggccaggctggtctcaaactctgaacctcaagtgatcctcctgcctcggcctcccaaagtgctgggattacaggcgttaagccaccgtgcctggcctcagtgaataatcttgtacagtagtcctcccttagtcaagaccctcacagtggatacctgaaatggcagatagcaccaaaccctatatatactatgttttttcttatatacacacataactatgataaagcttaatttataaattaggtacactaagagattaacaataactaatgataaaatagaacaattgtaacaagatgctgtaataagagttatacgaatgtggtctctctctggaatttttcagttaatattttcggattgcagttgaccacggataactgaaaccacagaaagtgaaactgcagacaagaggagattagtgtctatacatcattatctataaaatgaaggcccaggagagacttagtagatcaaaaagtatatgcatttgtaattctgataaaaagtagttcttaactttttttgtggttctgagcccattaacaaatctaatgaaaggtatggaactcagttcccaaaataatgaacagatacacaaaatttacatactaggagccttcacatggatccatctctagagatatttaaaaggggtgctaggtgtggtggctcacacctgtaattctagcacttcgggaagatgaggtgggtggatcacttgagaccaggaagtcaagaccagcctgggcaacatggcgaaaccccatctctacaaaaaatacaaaaattagcccggtgtggtggcacctgcctatagttccagctactcaggtggctgaggtgggaggatcacctgagcctggggaggtcaaggctgcagtgagccacgattgtgccactgcactcctgcctgggtgacatagtgacgatcccatctcaaaaaaggaaaaaaaaaaaaaaagaaaagaaaagaaaaagaaaaaaaactagatgatttagtaagggcctcagagctataatctcaaaattctgagaacttggagactttaccttgattgatttcagctgcagaaggccccaaactcaagctcttcttctgttgagcatttttggcaagaagcgtgtgcttgtcatcattccctgtatccatctctgaaatggtgacagccagaatccggcagaaattagcgagctgctgctgatcgaaattggatactaaggaactcagattggggacttcatctagtcggatcatttcctacagaagacaaaaatgaaacaatccccatgctcaattcactcaagagattggatgtgcctctctttcgcatccccttacatacggggcttagtggctagatcacttaggttcctatcccagctctgtaacttgcagctctgaaactttggttaagttacaaaaacctttcgagtctttgcttgtttatctgtaaaacggaactaatctacctcacaggattagtctgaggactaaatttaccttttgagcaccactgttttcaattgttcttgtggtatattttgcctatttaaaaaaaaaggaaatgcctaccactcaagttttggaaatcataaattaccattcttgctacagatttgcttttttaaaaaataaaatacttcaaatatagctaaaggcctctgtgtatcccccatccagtcgcatttttttctctccctgcagacgtaaacattattttgaactctgtgtttattattcccgtgcatgtttttatacttacaaatatttccattaaaatacatgttactgctctgcatgcacagtgtgaatgataccatactataccttacttttcatccaacattttgaagtttatctacactgatacaagcagctgattcaatcacttcccgccgttttaccccacagtttaatcatctctctcttttaagagacagggtctcactctgttgctcaagctgcggagcagtagtgtcatcatagcttactgcagactcaaactcctaggcccaagcaatcctcctacctcagcttcccaagtagctaggactacaggtgcgtgtcattacacctggctacttttttaatatttttttttttgagatggtatctcattgtcgcccaggctggagtgcagtggcgcaatcttgactcactgcaaactccacctcctgggttcaagtgattctcctgcctcagcctcccaagtagtggggattacaggcgcccgccaccacgcctggctaatttttgtattttttagtagagatggggtttcaccatgttggccaggctggtcttgaactcctgacctcagatgatccatccaccttggcctcccaaagtgctgggattacaagcgtgagctaccacgcctggccaatactttatttttatggagacagggtctcactattgttgcccaggctggaactcctggactcaagcaatcctcccaccttggcctcctaaactgctgggattacatgtatgagccactgtgcctgaccctttcttcttttaatacatatttaggtaaactacagtttttcactattaaacaatgttgcaatgaacattcttacaggtactctctgtgtacacatgtatgtgaccatttatccagagtgagagcaagaattcttgtctttttcttgactttaccagaaataattccaaaacattaaaattaagttcaatatttgctgtaaattttaatatcctataagttaaattttaataaataccctatatatagtttataagttttccttctattgctagcttttattaagaatgataattttatggaatgccttgtgctatttggttctattctcactcattactccttaaaatctgtaaatggcatgtactacatcaacttttctcattttgaaccatccccgtgctactcagataacacctgctatccttcatcccactaatttacttccactggattgggtgtttctctttcactgcacagatcacatgaacttttaataatctgttcctgcatctatttcccaaataatctgaccatactttgatgaaggcatatatcctaccctttctcctgagactcaatgcacaggacctggtagcaagggtatcagtgaatgtgcccaaaacgagtgcatgattcctagaagctctcatgaatcccatactcgcctctatttctagtaatggaggacaggaatttgctgtgcagggggcattggggaacaactgcttccacttttccttttccctagtacaaaacaaatgtaagctactactattattggcaactgtaacttgtagctcaccagttcctctagccctgtctaactcagtatatggttcccaaaacaggtcccaccacccccagcccacttcttatggttttttgttttgtcttaaattttaagatttttttttttaaggcggagtctcactgtgatgcccaggccagagcgcaatggcacaatctctgctcactgcaacctctgcctcctgggttcaagcaatttttctgtcccagcctcccaagtagctgggactacaggcatgcaccaccatgctgggctaatttttatatttttagtagagacagggtttcaccctgttggccaggctggtctcctgacctcaagtgatctgcccacctcggcctcacaaagtgctgggattacaggcatgagagccactgtggctggccaagaatttacttcttatgttttaatttttgatatgtacaatacgtattatgcagcacaacaaaatgactagctgtgtgtgcctttcctattgcatctctctgcctctgggaaccaccatcattaattattattgccttgccatttaaaaactagttttatcaacaaataatttgcttttttgagctttatgaaaatgatatactacctacagtgttctgcaactggcttctaccactcgattatttcaattactcagctatgttgttgcctatggcaacagttcattcatttctactatataatattccattgtgtgaagaaagtacattcatcccttctcctattcatggatcagagacttggtttcagttttttgttctgaaacaacgaagctacaaatgttcttatgtgtttcttgatgcacaggtggagaagtttttgctggggcagtggcttctaaactttttagctatcaccaagaacgaccaccagtaaacatacatattggaatgtatatagaaatgtcaaacaaaaacttattcaaaaaatacccttacacaatacagtttgatcttttctacttggctggtagacccgatggactgactttacaaccttctgggtttcaatcctaagaatcactgttctaggactgagcttccccacaagtgtgtccaggcacaggttataggtaacccatggcaaaatactgatgcctcagccctcagggtaaagcttccctaggtgctggggcacaagatatgtgcctgttcaactacaaaacaaaaaaaaagaggatattctgctgataaacatttatcagtagtatacaagtgtttccactgatacacacactcaccaacatttgcccactctctccctcactatggtattgatttgcatttccttgattgccaatcaagttaaacatcttctcttttatgtttatggaccatttctttcttgtctgtgaaatgcttgttcataacattgcccatttgtctactgggctatttctctttttcatgctgatttgtaagaattctgtttttttttttttttttgagagggagtcttgctctgttgcccaggctggagtgcagtgacataatcttggctcactgcaacctctgcctcccgggttcaagcaattctcatgccttagcctcccaagtagctgggactacaggtgtgcaccaccatgcctggctaatttttgtattttttagtacaaaatgagactgggttttgccatgatggccaggctgttctcaaactcctgacctcaagagatctgcctgcctcagcctcccaaagtgttggaattacaggcatgagccaccgtgcctggcctgtaagaattattgataaattctgaatacaacaaatcctttgttggttacctgaattcaaatgtcttttcccagtttatggtgtttccactttctttatggtatctatccccctttcaaactgcaccaagatacccataatgtttggtggaacacctcgccattttggggtacacaaaaaggaatgagagggagtgagaggcaagtgggaaaagttgtgaaggagcacttctagactcctatgctgagactgctaaggagtctggagtttccactctggaggtcccctttcacacactggctggaacacacaattactggaataacaacaaagcctttttatcaaagggcacaaagggtctgtctggggcctgcacacatctccaatgtgttcctacagacaataggccacttgtgctgggcaatgacaagcaaggcctggggaaagcacagcaagaagaaatgaacgctgggttcaccacagtgcacatgaacatccacctccctgcaacagcaacctctaggaggctgctcaacaggaagagaaagaaatctgccaaccagcaaccaacatggaggctcaggacagattaggactggggaggtgagctccaggtcctaacaagcattacaccaaaaatgtaacacagtaagtctctaacagagatctatgaatgtatttttgggtatctgtgaattcttgaaatttttaatttagttttcatttcgatcatagctgtttttttttttttttaaagttatgggtcatccgaatattaaccttatgaccaagtggcaggatttcagagctcccatttgtctcctactgcgctggtgccaattaaccaactttaattgttgaagactaatgagaaaaaatagaggcggacttcataagtgaaagccaaacattactaccaaggagaacatatcctaatgaatgaaggcttcacaccagttcagatagcggtaaagtggtaagagaatggagtcactgcatagcatacaatagcacatacatgctacaaagaacttgccccaacggtgatgagtgaggggcaatttgatttcagcaaagtaacatgaggcatcaccctacattcacagagtcaatctgaagttctgagttttagaattagtttgatttcaatgtatgtctgtttaggttttacagtcatttaagaaccactagtataaggggtaatcaagttttatacttgaatacatctgagtaacaagacataatttaacactttcttttaaaaaagctctgtatattattcagttttgagaatccaatggtctgagacacccttccccatctggtcagctagaggacacagctcacctttttaacacccaaaatatcttcaatgagggttgctgtttgtaagaatgtcttcttacttgtcatcaatgtaaacaggaagatcacaaagtcattcttttctgccaaacgctttgtaactccctctgtctgtcacaagaagaaaaggcagaataggttgtaagtacaaaataaattatgaaagtacaaggcatcctttacagacactgaaaagcagtttcacctctgaaaactggcatgagtcaacaaaacaggaatggcatggcttaactgtgggaaacgctcgttaactccccagctatggaagaaaaaagtctcctgacgtgcaggctacacaagtgggaactcacttgtgagaacataacacaatgagatggtatttcctaaaataacttatctcagagttctgaaggccattcttaaatctgaaatcaaacagtgccgaagcatggacttaagagtcagacctaagttctaattccagctgtgtgatcctgagcaaatcacttctcacctttggaactccatttttttcatcagtaaaatgatcatcttaaaagtctttgaggccaggcgtggtggctcacacctgtaaccccagcactttgggaggccaaggtgggcagatcacttgaggccaggagttcgagaccagcctggccaacgtgccaaaaccctgtctactgaaaatataaatattagctgggtgtggtggtgcatgcctgtagtcctagctactcaggaggctgaggtaaaaggatcatttgagcccagaaggtggaggctgcagtgagcctagactgtgcaaatgcactctagccttggcaacagagggagaccctaactcaaaaaaaaaaacaaaacaaaaaaaccaacaacaacaaaaaaacaaaacccccaaggggtatgaaggaagttaaggaaactagctggtaaaagaccttaaaacttaggttcaagagtttggatttaaaactgcagtattgtcaagtgcagtggctcacacctgtaatcccagctaccccggaggctgaggtgagaggaccgcttgaggccaggagtgtgaggccgcagtgagctacaatctgtctcaccactgcattccagcatggggacagagtgaaaccctatctctaaaaagaaagaaactgcagtactgctatagcttacacacacacacacacacacacacacacacacacacatatatatcccacccctactgccttaaggcaactagagcttagtgactttaatatttcttttttttagcctctaagctgaaaaaattccaaggtttactgcgataaacttgacttctccttaaaaagtataatcaagagtgcagacacacacagtttggtaaatgggaaccccaagctaggaggcatttcagaatcagtgaaatgagatatgttgcaacaaatttaattttctttcttttaattttagagacagggtctcactctgttgcccaggctgaggccatgactattcacaagtacgaatatagctcactacagcctcaatcacctgggctcaagcgatccccccacctcagcctcctgaatcactgggactacaggcgtgcaccaccgcacctggcaaatttaattttcaaagtgaaggcatcaataaagatgtgccacgtatataaatctttgacgatcacattaaataggacactaaagaaagcaatctccatctgtattaatacatttcggttcttcagtcgtagcactgacacattaaaaaaaaaaaaaaaaaaggttgttattcccgaactacatacagtacctacactggctatgatatgtgaaacaggactgactctagttttactgacaagcaaaagttctggaagatccaaagaaacagaacaaaaagagaactaaatttacactttctcaaagcttaaaaatctatctccaggctgtcaaatacacaaccctgctgctctaactagctacccttgactacccacctttctcctctcttcaatttatcaaagtgctactccttttacagactgactaaaatgactcctcttggaaaaccttcccaagtcaacagtggccacccaaaaggccatcacaatccttcctttcctctatatcacaagttcttaactgaggccaaaaagcactaaaacaatatataaaaggttgtatgcaactacatttttcgggggagagttttttccatgtaacattcatcataggtttttttttggtttttttttttttttggagacagggtctcactctatagcccaggctgagtgagtacactggcacaatcatggctcaccgcagccttaacctctcaggctcaagcaatcctcccacctcagcctcctgaggagctgggactatggtatataacaccacgtccagccagttttttattttttgtagagacaggttctatgttgcccaggctggtcttgaactcctggacacacacaattctcctgcctcggcctatcaaagtgttgagattataggtgtgagccactgcgcccagcctaatcataagctcttgacctagtatctgtcaagtatctaaatgaggagctacaaactagcatccagtaggccaagctttttctggtgagcagtactgtttatttttttatcttttattttttgagagaccctcactctgtcacccacgctggagtgcagtggtgcaatctcagctcactgcaacctctgcctgctgggttcaagtgattctcttgcctctcctgagtagctgggactataggcatgtaccaccacacctggctaatttttgtgtttttagtacagacggggtttcaccatgttggccaggctggtctggaactcctgacctcaagtgatccacccgcctcagcctcccaaattgctgggattacaggtgatagccaccgtgcccggccaacagtactttttaaacttttgaattcaaacatctttagacaggacatacttgctccagtttagtcacagtttacacaagtccccactccaacaccagcaattccaaacatttcctgttttctgcctgatccctggaggcattggtgtttgcaaccctgagagccccaggttctctacattaacatggaattcagccagatagcacataattgaaccatatcgccctatgttcctcaaattttttaaaaaattttatttaaaaatacttttagttgatatataataaaggtacataatttcagggagcatataatttaatacattcgtataatttataaaaatcaaatcaatgtacttgggatagccatcagcttaaatacttgtcttttctttatgctaagaaccattcaaattctcttctagctattttgaaatgtaaaacagaacagaatattataaactaagtcacccttactgatttatctaacactaggtcttatttatcatcccatatatttgtacccattaatcaacttctcttcatacatttcatttttttaacttaactgttttattggaatgtcactgattaacattaggtatcatgattttaaaacggcctcataaaactagtgactatatggagttgccaaagatggagtcattatattatacactgtcttcttctataaggacaatttcttattggccttagttgcaagaactgtgcatttcctgaacaatttgaaattttatcttatagatctccctgtgcctatctctgtcattggctatacatggctaccgagcacttaaaaggtggccaggccaaactaagatgtgctctgggtgttcaaacaagaggaaagaaaaacaaaacacacacacacattggattttgagagctcaatacgaaaaacaagtaaatatctcattaataattaattatactgattacatgttagaatgacaatattcttgatacactgtgttaaacagaatttatcattaaaattaacttcaccacttcttcctacttttttctttaaaaaaatgtggctacaaggaaatttaaaataacccaagtggcttgcattatatttcaattgcacagcactattatagatgctgaattacgtaagtgttcaaacatattcccctatttgtgttggctgctaagaagcttgaagccaaatttgtgcccatccgtaatacagatgattttatggtcttcatttttatatcagcccaattcctggctatacgttatgtccccacctttatcttcttctttcttacctgcttctaagttcgtgatcttggtagattttgcatacacccacaagatgtcagaaatcttattttgaatgaggcaagaaatgaaatggagctaaatgtttttttttttttatttccacagcatacagggttcacatttataatagcgctcgtctcattctgccatgtattatgattcacagtttacacagtttatcataagtttctaaaagacaggtactgtatcttttaaaaactaacatttatatattgttttacaaagtgttttcacatctactatctcatttctcacaataaatctatgatgttaatacaactgctaactgcattctattggtaagaaactacggcttgggaggtgtactaagccaagggccagaacacaaaatcaggtcctaacactaagtgccatcctcttttgtttctaccagattgctttctttattcaccattcttcctggctcagtggtcaacctagtagagtcctgctcaatatatgggcggggcttctggttctcattttgttttctaacaaggaaaatgaagaaataggcataatggagttaaaatgagtcttaaaggtcacagtctgccaacacttgtcaccttttgacaagtgtccagtttctacttggacagctctaaggccaaaggagtttactacctgctgcagcagtcctggctcttaacaactgctacaaaattctgcctccccgtaatttctaccagttagtcctgattttcaggcacacataaaataagcccgattcccccactgtctgaaagcagctcttatgtctgccattctactcgaatattcccatcttaaacattgcagacctggtaggggagataaacagagccccagtggcaggggtacttacacagacacaggtattatacaggatactcaagcagtccttggacatttcatcacttactgaaagtgaaagggtaatgactggttatttttctcaatgaaaagatagtacaacagttaccacatttttttcagcataagaactgttataatcccctccaagatgattatttttcctttaatatacttcttccagcccctgtctaccaaaggttttcatagtgcccatcagaacctacaagcccatttgcatattgcttttggtttgatacagcagctgttttcttattatgctccacagtcttcataatttcaacctgttgttgtgccatcatttaataaagccattttcccttaatgtcttgcttaggatatatctaggatttgttttttttgttttttgtgttttttggctatttaagtagaccacaaatgaacaacttaatatatatgtgtatccttttcatgtttgtattaaactagttcctcaagatacattttcaaaagtagaactactagaatctaaagtataggcatcttttttttgttcatttgttttggttttttaaatgaggtcttactctgtcactcaggggcacaatcacagctcactgtagtctcgaactcctaggctcaagcaattttccctcctcaccctcccgagtggctaggactgcatgcgcgtgtaccacgcctggctaaaagttaaaagtataagcatctcaattgctcttgttataaatttccattgaaagttctactgcagcaaacaaaaataccatttttatcagactcattaactgagcatttctttttttgttgctgttatctgtgttgggcaaatggctcttaatgtctgatctattactaattcttataaagaaactactacttccctgtgagcaggaacaggaaagtagcataaaaacgaaacttaattttcatgagcccaaaaccaaaagatgatgaaactgagtatgaaccatggacaaagtgctttatttggcacttgcttctattttttaaaattgtttccattcactcctaagctgctaggaatgctaaaatgctaggtctccttctcagatcccaatgggcagccctgccaagctagcttgactagatgggttgtctcataatcctgagacaacgcagacgctctgcatcccttatcaccacctttcaacctactggggctctgtgattgatttatttaacgacttcagagcagggtgaaacactgctctgcatgtctcactatatatctcactatttctagatcctccatttttaaaaggaattgggattcactcattcatcaagtattgttcagcatctactctagagcagatacagtggtgagggaaaaaaagtctcagccttcatggaacctataaatctagtgggaagaagagagactaaacaagtgcaccaacaaataattacaatatgctacttgctatgagggtacatagagaacatgaaagaccaagttagaatacacagctgagacattaaaaatgaatataaatcctcttaataaccactactgcatgcacaaatgaggccttatacagtatgtcgtattggggtaaaaaaaaaatcttttaaattaaaaaaacgcaaagttggtaggagggcattcaccaaacattaactgaagtcatctctggcttttaacaccagagtaaagtgcattcacttttttattttaaattaaataccgaagctgggtgcggtggctcatgcctgtaatcccagcacttgggaggctgaggtgggcagatcacttgaggtcaggagttcgagaccagcctggtcaacatggtgaaaccccatctctactaaaaaaaaaaatacaaaaattagccgggtatggtggtgggcgcctgtaatcccagctacttgagagggtgaggcaggaaaatcacttgagctcaggaggcggaggttgcagtgagccaagatcatgccactgcactccagcctgggcaacagagcgagagactgtctcaaaaaaaaaaaaattgaatacctaaaaagaattatttgtaacgtgtaagttataaaaaataataatagaatattacccatatatctaccacccagcttaagaaatagtgcataccaaaacactctgactttttaccattcacaccctggtaatgcctgaactttttacaaagagcatgtatcacctttctaaaaaaaatagtttaaaaaaaataaaacagagtgatcttactctctcagctagttatatgtgagaaagaagaatttcccaaggaaacatagaagctggatcacaggactatcaaaagtacaaagatgcattctcttaacccagatctgaatttctacgcagtacagaatgaataaagacagctgcttagctgggggaggagagagcaacctgtagctaaatgtaagacatgtccttactattaagagttaggaagggaaggaagaaggcagctgctgggaactgccaccgtatcggcaggttggaaaacaaggaccagtagctaataggtatacttacttttcagtttctgtccccggatagagatcgtaggcctcataagaatttctacaagaagctataaaaaaaattagataaaatcttcaaaattaattcaaagtataacttataaaatgattttgccataaccattcatggcccatgtatctgtcacagtattacaagacccttttgttccaggaggcagttaaggttcagtaaggctcctgactgcagcaagtcaggagacccaggttctagtcccagcttggccacctacttgcccttctctggcctcagctttctcatttttgaaaagaagtattttagattaggtaatctctgggatctaatgcggctttaatttctgaaaagctgcagaacattattactatgattcttctgtttaaagaacatttgtaagtttattttaaaaggactcaaaagatacaccataaattgttaacactgatttctacaggtttgggggttatatgcatgtgttttttattttacatactttaatacaattttgcacaaactgtttaaaataagcatgtatttaaaaattcattctacggagagaaaggatagttgataaaagggtcaatccattagaaagatataacaactacaaatatgtatgtacctaacaatagagcccaaaaatacatgaaacaaaagctggcagaaatgaaggaaacagataatttaaaaataaaagttggacacgttaataactctgctttcaataatagacaactaggcagacgagcaaagaaatagaagacttgaacacaacgaacacatatattctaacagacatctacagaacactccatgcagcaagaacagagtatacattctactcaagtgcacatgaaacattctccaggacagatcaaatttcaggccactgaacaagcctcaataaatttaaaagcacttaaatcacatacagtatgttgtgtggccacaatggaatgaaattaaaatcagaacgaaatttgggaaattcatgaattatatggataattttaaaaacccatcctaaataataatgggccaaagaagaaaccacaaggggaagtataaagtatccaagaaggatgaaaataccaaaacttatgatgtagctaatggagtgctcagagggaaatttatagctgtaaatgcctatattaaaagaaaattcttttttttttttttttttttgagacagagtcttgctttgtctcccaggctggagtgcaatagccctatctcggctcactgcaacctccgcctcctgggttcaagcgattctcctgcctcagcctcagagtagcagggattacaggtgcctgccaccactcctggctactttgtgtatttttagtagaaacgaggttttgccatgttggccaggctggtcttgaactcctgacctcaggtgatctgcccaccttgacctcccaaagtgctgggattacaggcatgagccaccgcacccggccaaagaaaattgtttctaatcgataacctaatcttctaccttaagacactggaaaaagagcagactaaacccaaagcaagcaaaagggagaataagagttgaaacaaatgaaacagagaatagaaaataacagaaaatgaacaaaaccaaaagctggctctttgaagactggcaaattcttaactagactgaccaagaaaaaaggagagaggatacagattactatactcagaaataaaggagagggcattaccaccaaccttatggcaacaaaagtgattataaggaactactatgaacaactgtatgccaacaaattagatgacctagacgaaatggacacattcctagaaagacataaaactaaaaactgacttaagaagaaacagaggctgagcatggttgttcatgcctgtaatcccaagactctgggcggctgaggtgggaggactgattgaagccagaagattgagaccaccctggccaacacagcaagaccccatgtctctacaaataaaataaattagctgggcgtggtggtacgcctatagttccagctacttgggagactgaggcaggaggattacttgagcccagaaggttgaggctgcagtgagctatgatcatgccaatacactccagcctggatggcagggtgagactccatctctttaaaagaaaaaaaagaagaagaagaaggaagaagaagaaagaagaagaaataagaagaagaagaagaggaagaagactacgacgaagaagaagaagacgaagaagacgacgaagacaaagaagatgaagaagaaggcgaagacgaagacaaagatgaagacgaagaagatgaagacaaagaagacgaagatgaagatgaagaaaagatgaagaaaagacgaagacaaagatgaagatgaagaagacgaagacgaagaagacaaagacgaagaagacgaagaagaagaaaaaacagaacatctgaacagccctataacaagtagagactgacttagtgatttaaaaaaaaacaaacaaaaacaacaataacaaaaaactacccataaagaaaaaccttggacatgatggctccattggtgaacaatacaagacatttaaagaatgatcaattcttcacaaactcttccaaaaaacagaagagaaggaaacatttcccaactcattctttgaggcgagtattaccctgataccaaaaccaaacaaagacatcacaagaaaactacagatgagtatctcatgcatatatacacaaaaatcctgaaaaccctagcaaacaaaatccagacacatacaaaaaggattatactccacgcatgatggcttatgcctgtaatcccagcactttgagacgtcaaggcaggaggactacttaagcccaagagtatgcaaccagcctgggcaacatagtgagaccctgtctctacaaaaattaaaaccaaaaattagccaagcatggtagcatgctcctgtagtcccagctactcaggaggccgagataggaggctcgcttgagcccaggagaggctgcagtgagctgtgatcacaccactgcattccagcctgggtgacagagagaccttgtctccaaaaaaaaaaaaaaaaaaaaaaaaacaagaaaaggattatacaccatgacactatgacaaagtggaatttatcccaggaatgtaaggttggttcaacatatgaaaatcaatataatacaccatatcaatagaataaaggacaaaagccaaaagccacacggtcatctcaacagatgcagaaaaagcgtttggaaaaaaaaacccaaaacactttcatgataaaacaatcaacaaggaatagaagagaacttcttcagcctgataaagggcttttattaaaaaacccacagctagcatcacgcttaacagtgaagactaaatgctttcccattaagatgaggaaaaagacaaagatgtccactctcgccacttcaatttaacattgtactgagtgttctaaggcaactagagaaaaataaaaaaagaaattaaaggcacccaaattggaaaggaataagtaaaactaactatttacagatgtcacaatctagaatacagaaaattcctaaagaatccactcaaaaaaactattagagccaataagcaagagttcagcaagatttcacgatatgtgatcaatatacataaatcaactgtatttctaaaattgtagcaagaagcaaaaaaaactggaattatgaaaacaattccatttaaaggagcatcaaaaacagtaaaaacacttagaaataagtttaacaagtgcaagacttgtacaacaaaacatttttgaaagaaattaaagacaatctaaaaaaatggaaagctatcttgtagttcatggatcagaagatttaatattgttaagatgataatactccctaaattgacctacaaattcaatgcaatcactatcaaaatctcagctggcttctttgcagaaattggcaagctgatcctgaaattcacatgcaaatataagggatgcataacagccaaaacaatcttgatctgtaaatacaaaaataaacccgtgtctatgatcagttgatttttgacaaggttgccaagacaattcaatgatgaaagagtagttttttcaataagtggtgctgtgacaactggatagtcacatgcaaaagaatgaaactggacccctgcctcacatgataaacaaagtcaatgcaaatggatcaaagatctaaatgtaagatacaaaatataaaattctcagaagaatacataggtaaatctttgtgaccttggattaggaaatggtttcttagatgcacaccaatacccaagtaacaaaagataaaatgaacttcatcaaaattaaagactttgtgtttcaaaggacaccatcaagagagtgaaaagacagctacttaatgggggaaaatatttgcaaattacaaggaattagtatccagaaactaatacaactcaataataaaaagacaacccaatcaagaaatggagaaagcagatgaacagacatttctccaaaagtccaataataaacagatgatcaacattagtcatcagggaaatgcaaatcaaaaccacaatgagatacctcttcatacctactacgatggttataatgaaaaagacaaatagtaactattggcaaagatgtggagaaattagaaccttcatacactgctggtagatatgtaaaatggtgcagctgcttcagaaagcagtctggcagatccttaaaaattaaacagagttaccagcaactccacttctaggtatataccaagggaaattttttagtaagacaatctaatagaaaatgaaaacacgtccacctaaaaatttatatgccaatgttcatggcagcattattaatcatagcagattactaataatagccaaaagtgggaacaacccaaatgtccatcaactgatgaatggataaataagatgtggtctatccatacagtggaatatttcttgacaataaaaaggaatggagtattgatacacgttatgacacggattaaccttgagaacattatgttaagcaaaagaagccagtcacaaaagaccacgtattgttatgactccatttatgtgaaatgtccagaataattaaatctataaagacagaaagtagattagtggttgcctaaggatgtgggagggaggccttgggaggaaatggggagtggctactgaagaatatggtgtttcttttttggagtgatgaaaatgttttaaaatcaattgtggtgacagtggtatataactctgactatactaaaaaactgaattatatcttttaatatatcttttaaatgggtgacttgtatgacatgaattatatctcaataaagctattatttaaaacaataaaacacctcatgctcagttatagaagctagacataaaaagccacacagtggacgattctgttgatatgaaatatccgtaacaggtgatatggtttggctgtgtgccctcacccaaatctcaccttcaattgtaataatcctcatgtgtcaagggtgggaccaggtggaggtgactggatcatggaggcaggtcccccatgctgttctcgtgataacgagggagtctcatgagatctgatgattttataagtgtctggcatttcccctgcttgcactcactctgtcctgctgccctgtgaagaaggtgcctgcttctcctttgccttctgccatgattgtgagtttcctgaggcctcccaggccacatggaactgtgagtcaattaaacctccttcctttataaactacccagtctcaggtatttcttcattgcagcatgagaacggactgacagaacaggcatattatggacattatggatatttcacaacaggcataatacagacataaaatagattaacggctgccagagctggggagaaggggagatggggagtgactgctaatttgtacaagatttctttttggcgtgataaaaatgttctggttatcactgcacaatactgatgggtggttacaagaattaactttatgtaaattatatttcaataaagctgttattgctggggaggcagggtggctcgtgcctataatcccagctactgaagaaggtgaggcaggaagatcatttgagaccaggagttggagactgcctaaggaacaaagcaagacccccatatctctaacaaatattaaaaaattagccacgtgtgatggcatgaacctgtagtcccagctactcgggagactgaggcaggaggatcactagagcccaggggttcaaggctgcagtgagctaggatcgtaccactgcactccagcctgtgacacagtgcaactctatctctaaaatcatcccaacaatttttaaaagctgtaattaaaaaaaattctgttaaacaaattctaggttaatataaacagaaaaaaataaatgttagaaaggaatactcccgaatcttaacagtggttgaattttggtgacaagtcccaagacagtttttcacattttccttgacaaacaccttttccttttaaaatgagaaaaattaggacctttgttttccaaaaaagtccaattttcacttaaagcatttaaaaattatctatatgctgagaatatgactaagcccatatgtttaaagacattccctatatacgtatgtattttttattattgtttaaatcaagctaggagctaccccagaacaaaaagaaaaattcttccttagccccttctagctataggccaatacttaggcagcatgtccaagacacctcaagccaaatgaagaaggaagattccatagcattttttaaattaaaaagccagcaggcaaatctttgagactagacagttcagcttgagggtctgagaaagcctctgctcatctcaaaccagcaacaaatctttagaaagtaattcacatgccatgagattgctcgtggcatgaatgtgacactataattcaacatcctgaattaagagagatgtgttattttagcttaaagcagcagattaaaaataaaaatcctaaactactacaccacagattgtcaattctagagaagcactgggctcagctttctgcacatctgtatttattgttaactgcacttgcaggagggaaaagaaagaagtctcatgacttgaggcaacaatgaaaactgccctgaacatatgcctgctttgctttgtataatagagacctaaggtcatcctctagaaaaggtgaagtaattattatacagtatataaccattttatagcctgttttcatcatgaattttcccatattactataactttaacattatattaacaacttcataaaattcaacaaaatagatagaataaccattatcttctcctggtagatagtcattacaaataatgttacacctaacggtcttggtatacacaagctttatctcattttgacttacgtcttcatcagagtcacagaaatggaaacaacagggcaaaatgagtagtaatgtttaaagctctgaagtatactacaccaattcttctcaaaagagatcacattcatccaagtaagacgtaagatgctcaagtgcatagaatgtatttaaaataaattaacttcaaatggaagatagactatgtcagtgaataaaagttcctgaatgccaagcaatggcttacacctggcccacaattactgaaaagctggaagatttttacctacaaatctagatttcccataacctctcagggaaacactcaatgggagaggaagagtcatttcctccataaaagcaggcacacactctctagcccaaaacattccccatactcatttaatttatgcagatgagcttgctctgggtctgcttcactccacttagttacatacttcacatctgctttgtaaactctaagacacacttttcacagtcatgttatggatagggtcaggctgacaaggagtgatcccactgagctttgggcagcatgaccaagagaggcttactttgggttcttgctagttattagcagaggaagaaataacaagctgtttggaaaatactaccagcagcaggacagcaagagagttcactaacaaatgcacccaaactgaaggtcagtgaggtgcataattacttaagcaggagcccatgtttataaaatgactgggattcctggagaagctgccctaactcaaagcaggaaagaaaaacccccacaaaatcaagaacagttgatccaaagatgtccgaagatgggataggctcctactagagagccacatttccactgcaaatagacacaggctacagacctacattattatttttcctcccataaatacatcagttcttactaagtagatttcttgatgaaacaattcaaaagtaaagggtctcttgagctagccaagtaagtaaatgccctaggaccaccgacactgctgtggagagggaatgcggagcagcagttaaagaagaaaggctgtggctgatgccatgcatgcagatgtcacactcaatctttactttactggaaaatggtagctttaaacaaaaggaaactttaataattgaagtataacgtgataccgcataaagagtacaatttttttttttgagatggggtcttgctctgtcacccaggctgcagttcatggtgcgatctcggctcactgtagcctcaacctcccggactcaaccaatcctcccacccagcccccatcaagcaactgggactgcaggccatgtgctaccacaatcggctaatttttttaatttttagtagtgatggggttttgccgtgttgcccaggctggtctctaactcctcaactcatgcaatccgcctgcttcggcctcctaaagtgctgggattacaggcatgagtcactgtacctggccatgagtataaattgcacatgtagttttacacactgaacaccattcctgtacaatcgccacatagatcaagataaagactaaccataatacccagaaatgccctctccctcatgttcacttcaggtaatggggttaagggcagatatctaggggagcaaagtcagatcctaacccctcagtcattacaccaaaataaacttcaaatgatgcaaaaatttaaacatacacaataaaaactgtaaaatattagaaggaaataggcatggtttaaatccaacagtgggaaaggcatgaaccaaaactctgaagccattatagtaaaacactgatcaatctgacaatctaaaaattaaacatttctaattttaaaataacatcaaaatttaattctcaaaatagtaaaaaaacacaaatgacaaaggcctttaaaaaatcaaaagcacttacagatcaataagaaaaaggacaaataatcaaatcgaaaaaggtgcaaaacagaaaactggcagaaaaggaactacttataaacacaagaaaaaatatccaatctcagtcatagaagaatgaattttaaaaactatgcagagaatttataaagaactcttacaacacaatattcaaaagagatatatctcaactaagaaattgaaaaaggagagacagacatttctccaaggaagatatacaaatgacaaactcaagaataagatggtcatcattggcaatcagagaaattcaaatcaagaccacaatgagatgtctcttcacactcactagaatggctgtaatcattacagggctggagcgggggctcatgcttgtaatcccagcactttgggaggccaaggctgggggactgtttgagtccgggagtttgagaccagtctgggcaacaaagcaaaacgccatctcagtactttttttttaaattttaaaacactttcaaaatgacagataacaagtgttggcaaggatacagaaaaactgaaacccttatacactgctggtggcaatgtaaaatggcagggcctcttggaaaacattctggcagttcctcaaacaattaaacatagagttaccccatatgacccagcaactgtattcctaggtatgtatatgcctgagagaaatgaaaacatgtccacaaagaacctgtgcaagaatgtttatagcactgttattcataatagcaaaaagacggaggcaatccaaatgcctctcaacaaataaaaaatgtggcatatccacactgtgaaacatcatttgaccataaaaatgagtgttgatacatgctacaacacagatgaatctagaaatcattacgctaagtgaaaagaagccagtcacaaaagaccacatattatataactaaatttatacaaaacgtccacgacagagaaatctatagagacaaaaagtatactagtgtggggagagggggaggaggtggtagaggtaggggagtgctagataaaacacatggagtttcttttttgaggtgatgaaaatgctctaaagttgactgtggtgatggttgcacatatctgcaaatatactaagaaccactgaattgtgtacttcaaatgggtgaaatgtatggtatatgaaccatatcttaataaagctgattaaaaaaaactatggaaaaatatcacttttctcataactgcttagtaaatacttaaaatacactgtttgtggaagggggcttctgggtactggtaatgttctatttcctaatttgggtggtagtgcaaaagtgaatgtattttgtggtaattattggtgtacttttctgtatgaaggttatacttcagtaacaaagtctataaaaatacacacataaacacagtatgttggtgatggtatgggtaaacagacgctcatactttgttcctggggatataaactgacaaaacttcttaggtaggtaaacttcagatttataaacaataaaaaacatacgttcttgttccaaaggtatatactcacatgtatacaaaaatatgtaaaagatctttactgcaaccttgtctgtaagagaaatggtgtggaaaaattataaatgccagtcaactggggcctgggtaaataaattatggcacaatcacaccaggaaacactaaccatttaatttttttttgagagctcatcacccaggctagagtgcagtggtatgatcttggctcacggcaacctctgcctcccggcttcaagcaattctcctgcctcagcctcctgagtagctgggattacaagtgcctgccaccgtgcccatctaattttggtatttttagtagagacagggtttcaccatcttggacaggttggtctcgaactcctgacctcacgatccacctgccttggcctcccaaagtgctgggattacaggcgtgagccactgcgcccggcctaaaattgttttaattaaaaaaaaaaaaagaagaagaaagaaggtacagaatagtgtagccgtgtatatggtatatcactctatgtgcggagaaaataaactaaggtggaggtggtggggaatatttacacacacacacacacacacacacacacacacaaaaaaaacaaaacatcttaagcaggacacacaagaaactagtaatcacaactggttctgaggaggggacactgggaaatttagagatgtacttttcacttagtatttttttaaaaaggtatacaccaatttaaataaatgaattcttctgaagtaaaaactatgctgcttcaacatgtaaatgccgctaagcttctaaaagttaaaatctgaaatgttataaattctgaaatctttcctatctcccatttcaaaagttaaattcccaaaccattaagcagtagtaacagcagtagtaataataaatagctacttacatcaacacctccaaacaagtcaaaaatgtaagtatttggataagtggtttcttgggtaagtttcctctcttcagtaacaaatgccatagcctccatggagagaagaggagaaatttcctagtttttttaaaaaaaagtacatacattgttttagtaaccaacacagaccagacactaaagcatcagtttgagctttagtcccaactggagttcccatgaacacaaagacagtccccaatgaaccacacttcctagtattcaggcccctgtaaagccccttctcacactaaatctgggctggtatgacacacctcaactaacagcatgtggtagaagtgacactaggccacttccagcacaagccttaagaaagccaggctcacacctgtaatcccagcactttgggaggctaaggtgggcggattacttgaggccaggagtttgagaccagcctggccaacatggcaaaaccccatctctactaaaagtacaaaaattagccggatgtggtgctacacacctgtaatcccagctactcaggaatttgaagtacaagaagcacttgagccacggaggcagacgttgcagtgagccaacatagagccactgcactccagcctcggcaacagagggagactctgtcattaaaaaaaaataaaaagcctgacagacttcgctcttgccatcctggaacccaaacatcatgctgtgagaacacagccaatggggaggccataaggagaagaaatgaggccaagagcaacatccttagttgatctccagctgacagccagcaccaacctgccagggatgtgagagagaccattttggacattccagatatctcagtaccaccctacccaacagcacatgaagcagaggagccactcagtcaaccaagaattgttgacagataaatgattcttgttacttccggctgctaggtttcggggtgactagttctgtagcaataaccaagtcactgctcaaatataatctcctgcaggaagtcttcttgatttcccccaaccagaagcatgctcttcagacccccaaaacaatctacaactcatttgtaacatttagcacttttactttgcacctatttacaaaccatttctttttttttttttgagagggagtctcgctctgccacccaggctggagtgcagtggcgcgatctcggctcactgcaagctctgcctcccgggttcacgccattctcctgcctcagcctcccgagtagctgggactacaggcgcccgccactgcgcccggctaattttttgtattttcagtagagacggggtttcaccgtggtctccatctcctaaccttgtgatccacccgcctcggcctcccagagtgctgggattacaggcgtgagtcactgcgcccggccaaacctatgttatttcttccctagactaaacgttccttgaggacaacacaaacagatcccactttgtattccccacagattccaagacagagtatttgatacagcacacatagggtagtagttctcaaactgacggccacagaatcctttgttcatatggaacaaagctaagaggaaaaaaaatcttacaagaaaacctaaaacatagtaagtttcaaataagtacttacttaatgaataaagaaatgatgatcacatagcaaagatatacaaatattaatttccctcccctttaacttcacctcaatctcctgagattttgcaagaagcaaataatgtgcaactctttgaaaagcatttttaaacaagtttaagaagctataattatttctatcagactgtgagattcaaaatatgaaaatgtctcttcttaaacgtaaagactaagtttaattagtttctattacattttaaaataacttactatgtgatataataatcaaaacttcacctctgaagaacactgtcattcagtttcattacgttcaatataacttacatggtttttatttatttatttttgctgttttttattttattatactttaagttctagggtacttgtgcacaacatgcaggtttgttacatatgtatacatgtgccatgttggtgcgctgtacccattaactcgtcatttatattaggtatatctcctaatgctatccctcccccctccccccaccccatgccaggccctggtgtgtgacgttccccaccctgtgtccaagtgttctcattgctcaattcccacctatgagtgagaacacacggtgtttggttttctgtccttaacgatagtttgctcagaatgatggtttccagattcatccatgtccctacaaaggacatgaactcatcattttttatggctgcatagtactccatggtgtatatgtgccacattttcttaatccagcctaccattaaatggacatttgggttggttccaagtcttttgctattgtgaatagtgctgcaataaatatacacgtgcatgtgtctttatagcagcatgatttataatcctttgggtaaatacccagtaatgggatggctgggtcaaatggtatttctagttctagatccttgaggaatcgccacactgtcttccacaatggttgaactagtttacagtcccaccaacagtttaaaagtgttcctatttctccacatcctctccagcacctgttgtttcctgactttttaataatcgccattctaactagtgtgagatggtatctcattgtggttttgatttgcatttctctgatggccagtgatgatgagcattttttcctgtgtctgttggctgcataaacgtcttcttttgaaaagtgtctgttcatatccttcgcccagtttttgatggggctgtttgcttttttcttgtaaatttaagttctttgtagattctggatattagccctttgtcagatgggtagattgcaaaaattttctcccattccgtaggttgcctgttcactctgatggtagtttcttttgctatgcagaagctctttagtttaattagatcccatttgccaattctggcttttgttgccattgcttttggtgttttagtcatgaagtccttgcccgtgcctatggcctgaatagtattgcctagattttcttctagggtttttatggttttaggtctaacatttaagtctttaatcaatcttgaattaatttttgtataaagtgtaaggaaaggatccagtttcagctttctacatgtggctagccagttttcccagcactatttattaaatagggaatcctttccccatttcttgcttttgtcaggtttgtcaaagatcggacagttgtagatatgcggcattatttctgagggctctgttctgttccactggtctatatctctgttttggtaatagtaccatgctgttttggttacagtagccttgtagtatagtttgaagtcaggtagcgtgatgcctccagctttggttcttttggcttaggattgtcttggcaatgtgggctcttttttggttccatatgaactttaaagtagttttttccaattctgtgaagaaagtaattggtagcttgatggggatggcattgaatctatcaattacctcgggcaatatggccattttcacaatattgattcttcctattcatgagcatgggatgttcttccatttgtttgtgtcctcttttatttcattgagcagtggtttgtagttcttcttgaagaggtccttcacatcccttgtgagttggattcctaagtattttagtctctttgtagcaattgtgaatgggagttcactcatgatttggctgtctgttattggtgtataggaatgcttgcgacttttgcacattgattttgtatcctgagactttgctgaagctgctcatcagtttaagaggattttgggctgagacaatggggttttctaaatatacaatcatgtcatctgcaaacagggacaatttgacttcctcttttcctaattgaataccctttatttctttctcctgcctgacttccctggccaaaacttccgacactatgttgaataggagtgtgctgagagagggcacccctgtcttgtgccagttttcaaagggaatgcttccagtttttgcccattcagtatgatattggctgtgggtctgtcataaatagctcctattattttaagatacgtcccatcaatacctagtttattgagagttttcagcatgaagggctgttgaattttgtcgaaggccttttctgcacctattatcatgtggtttttgtctttggttctgtttatatgatggattacgtttattgatttgcatatgttgaaccagccttgtatcccagggatgaagccaacttgatcgtggtgaataagctttttgatgtgctgctggatttggtttgccagtattttattgaggatttttgcattgatgttcatcagggatattggtctaaaattctcttttgttatgtctctgccaggctttggtatcaggatgatgctggcctcataaaatgagttagggaggattccctctttttctattgattggaatagcttcagaaggaatggtaccagctcctctttgtacctctggtagaattcggctgtgaatccgtctggtcctggactttttttggttggtaggctattaattattgcctcaacttcagagcctgttattggtctattcagggattcattcaacttcttcccagtttagtcttgggagggtgtatgtgtccaggaatttatccatttcttctagattttctagtttatttccgtagaggtgtttatagtattctctgatggtagtttgtatttctgtgggattggtggtaatatcccctttatcattttttattgcatctatttgattcttctctcttttcttattagtcttgctagcggtctttcaattttgttgatcttttcgaaaaacgagcttctggattcattgattttttgaagggttttttgtgtctctatatccttcagtactgctctgatcttagttatttctcgccttctgctagcttttgaatgtgtttgctcttgcttttctagttcttttaattgtgatgttagggtgtcaattttagatctttccggctttctcttgtgtgcatttagtgctataaatttccctctacacactgctttaaatgtgtcccagagatcctggtatgtcatgtctttgttctcaatggtttcaaagaacacctttatttctgccttcatttcgttatgtacccagcagtcattcaggagcaggttgttcagtttccacgtagttgagtggttttgagtgagtttcttaatcctgagttctagtttgattgcactgttgtctgagagacagtttgttataatttctgttcttttacatttactaaggagtgctttacttccaactatgtggtcaattttggaataagtgcgacgtggcgctgagaagaatgtatattctgttgatttggggtggagagttctgtagatgtctattaggtccgcttggtgcagagctgagttcaattcctggatatccctgttaactttctgtctcgttgatctgtctaatgttgacagtggggtgttaaagtctcccattattattgtgtgggagtctaagtttctttgtaggacttgctttatgaacctgggtgctcctgtattgggtacatacatatttaggatagttaactcttcttgttgaattgatccctttaccattatgtaatggccttgtctcttttgatctttgttggtttaaagtctgttttatcagagactaggattgcaacccctgcttttttttttgttttccacttgcttggtagatcttcctccatccctttattttgagcctatgtgtgtctctgcatgtgagatgggtctcctgaatacagcacgctgatgggtctagactctttatccaatttgccagtctgtcttttaactggagcatttagcccatttacatttaaggttaattttgttatgtgtgaatttgatcctgtcattatgatgttagctggttattttgctcattagttgatgcagtttcttcctagcatcgaaggtctttacaatttggcatgtttttgcagtagttggtatcggttgttcctttccatgtttagcgcttccttcaggagctcttgtaaggcaggcctggtggtgacaaaatctctcagcatttgcttgtctgtaaaggattttacttctccttcacttatgaagcttagtttggctggatatgaaactctgggttgaaaattcttttctttaagaatgttgaatattggcccccactctcttctggcttgtagagtttctgccaagagaaccgctgttagtctgatgggcttccctttgtgggtaacccgacctttctctctggctgcccttaatattttttccttaatttcaactttggtgaatctgacaattatgtgtcttggagttcctctcctcgaggagtatctttgtggcgttctctgtatttcctgaatttgaatgttgacctgccttgctagattggggaagttctcctggataatatcctgaagagtgttttccaacttggttccattctccccgtcactttcaggtacaccaatcagacgtagatttggtcttttcacacagtcccatatttcttggaggctttgtttgtttctttttattcttttttctctaaacttctcttctcgcttcatttcattcatttgatcttcaatcactgataccctttcttccacttgatcgaattggctactgaagcttgtgcatgcgtcacgtagttttcgagccatggtgttcagctccatcaggtcatttaaggtcttttctatgctgtttattctagttagccattcgtctaatcttttgtcaaggtttttagcttctttatgatgggttcaaacatcctcctttagctcggagaagtttgttattactgatcatctgaagccttctctcaactcatcaaagtcattctccatccagctttgttccgttgctggtgaggagctgtgttcctttggaggagaagaggcgctctgatttttagaattttcagcttttctgctctggtttctccctatctttgtggttttatctacctttggtctttgatgatggtgacatacagatggggttttggtgtggatgtcctttctgtttgttagttttccttctaacagtcaggaccctcagctgcaggtctgtcagagtttgctggaggtccactccagaccctgtttgtctgggtatcaccagcagaggctgcagaacagcaaatattgcagaacggcaaatgctgctgcctgatcctttctctggaagcttcatctcagaggggcacccggctgtatgaggtgtcagtcggcccctactgggaggtgtctcccagttaggctactcaggggtcagggacccacttgaggaggcagtctgtctgttctcagatctcaaactctgtgctgggagaaccactactctcttcaaagctgtcagacagggacatttaaacctgcagaagtttctgctgccttttgttcagctatgccctgctcccagaggtggagtctacagaggcaggcaggtctccttgagctgcggtgggctccactcagttcgagcttcccggccgctttgtttacctacgcaagtctcagcagttgtggacacccctccccctgctttgctgccaccttgcagtttgatctcagactgctgtgctagcagtgagcaaggctccgtgggcatgggaccctccaagccaggcgcaggatataatctcctgctgtgccatttgctaaggccgttggaaaagtgcagttattagggtgggagtgtcccgattttctgggtaccatctgtcatggcttcccttggctaggaaagggaattcccccaccccttgcgactcccaggtgaggcaatgccccgccctgcttcagctcacactccgtggactgcacccactgtctgacaagccccagtgagatgaacccggtacctcagttggaaatgcaaaaatcacctgtcttaggcatcgctcatgctgggtaccatagactggagctgttcctatttggccatcctggaaccggacccccacttacatgggttttaactgcattagagctggtgctctaaattcaaatttagatccaaactacagctaaagtttagatactccagccctactgaatcagaatttcaggggtggggcccagaactctgtgttttaacacgctcttcaggtgattcataaacacactccagtttgagaacaattatcctagcataatgtctccgtgctctttccactcatttcccaatcatcaaacctggccccttcaatcttcttacgttagtaataatattcaacaaccataaggcctcttccacgagccttcagcagtatgtaatcttctaaacccttttcaaaaagaatgtcatcccaatcacaggatagtgttgacctcccaaaattaagcaagcactgccacaaaataaacacacatagagcccaaaaggataacacagggaacctaatggtgattatcttgggatgatgggattataggtgatgtatattttcttctttgtactttttctgaatttctcaaattttctatagctcacacagtaaaaacaggctatttttaaaagccaacggaagggaaaaaaaaaacagcagacatcttgtgtcacctagaggccctgaatacgcccctccaaggtccttaagagttaccttgaggatgttttgacactcaacaaagtcactgtggaggtggctggtggtgtgcagcttgaggagcagctgaggaattccactccacttggattgtttgtccctctccgtcaaaaaagtctcagtgaactgtgagtcaaaaaaagagagaacatattattgtattattgatgataatagctgatacggcaaaggagagcagccgacttccaaacccacccaggacagttacaaatttatctctaagcactactataaaaagcctctttctataaatcttcaaaacctccccaacagcctattactatgttataataagaaggagggattggaaatactcttgtaccactcacaaacagcacaatatcattgagagtggacttagactcgtcgtaaatatatactggaaattctagggcaactgctaaaagtatttttacaagaagaataattgatatgctaagagatgaaaaataatggaaccatataaactgctcagttaagcccataaaaggcagaaaaagaggggaagacaaagaacaagtataataaaacaaacatggtatacattaatccaactatatcaataatcactgtaaatatctatgaatggtctaaacttaccaatcaaaggaaagagactaaaagaatggatttaaaaaaccaagatccaacaatatgctgtctacaagaaactcatttaaatatacatatagataggttaaaagtaagggaaaaggccaggcacggtggctcacacctgtaatcccaacactttgggaagccgaggcaggtggatcacctgaagtcaggagtttgagaccagcctggctaacgtgataaaaccccatctctactaaaaatacaaaaattagctgagtgtggtggcaagtgcctgtaatcccagctactcgggaggctgaggcaggagaaccgcttgaactcgggaggcagaggttgcagtgagccaagatcgcgccatggcaccccagcctgggcgacagaccaaaactctgtctcaaaaaatagaaaaggggatggagaaagataaatcacataaaaagaaagatggagtagttatattaatttcagagaaagcaggcttcataaaaaaattatcagaaataaagtgggtcatttcataatgacaaaggggttaattctccaagaagacataacaatccttatcatatatgcacctaacaacagcatgtcaaaatatgaggcaaaaactgcctaaaagaactgccagacaaaaaaatggcaaatcaactcttacagttaaaatattttaaactaaatgaaaatataacttatcaaaatttgtgggatgcagcgaaagcagtaataagccagaagtgtatatcactgaatgcatataatagaaaagaagaaatatctatagtcaataatctaagcttctaccttagtaaactacagaaagagcagtttaagcctacagcaaacagaagaaaaaaataaaaatgagagcaaacatcactgaaattgaaaacaaaaaatcaagagagaaaacaaaaccaaaagttagttctttaaaaagatcaatacgattgataaactctaaccaggcttatcaagaaaaaaagacagaaacacaaattactaatatgtggtacataagaggagttattattactgactccatggacttcgaaggatgataaaggagtattatgaaccgtttgccccaatatttgcctagcactttgggaggctaaggcgggaggattgcttcagctcaggagttcaagaccagcctgagcaacatagcgagagctcgcctctactaaaaataaaaaaaaaaaataagccaagggtggtggtgcacacctctggtctcagctactcagaaggatgaggtgagaagatcacttgagcttgggagaatgaggcggcagtgagctatgacagcaccactgcactccagcctgggtgacagagcaagataaaaaaaaaaaaaaaaaaagacatcattataaccaaagagtgaaacaactcaaatgtccatcaactgatgaataaataaaatatagtatatccatccaatggaatattattcagcaaaaaaagtaatgatgtactgatactacaacaaggataaatcttgagaccattatgctaaatcaaagaagccagtgtctaactgggcacagtgtctcatgcctctgatgccaaagtaatcccagcactttgggaggccaaggtggacagatcacttgagctcacaagtacaagaccagcctgagcaacatggcgaaaccccacctctacaaaaaaaaaaaaaattagccggatgtagtggcacatgcctgtagtcccagctactcgggaggctgaggtgggagaatggcttgagcccaggaggcagaggttgcagtgagccaagactgcgccactgcacttcagcctgggcgataaagccagaccttgtctcaaaacagaaacaaaaacaaagcgagactccatctaaaaaaaaaaaaaaaaaaaaaacctaaaagaagccagtctcaaaaggccatatattgtctgattctattaatttaaaatgtccagaataagcatatccagagacagaaagatcactggttggcaaaggctgtggggatggggaaactggggagtaactgctactgaataccaggtttcttttttgggtgataaaatattctaaaattgatcgtgatgatagatgcataactttgtgcatacagtaaaaaccactgacttgtacacttcagttttttttttttttacccttttatctccttagtttaccaacttgtacactttaaaagggtgacttgtgcaatatgtgaattacatctcaataaagctgctataaaaactaaataaataaatgaacataagtgaactttttaggatgacaatgttctaaaaccagattgtggtgatggttgcataacttcatcaatttgctgaaaatcactgaactgtacacttacaatgggtaaattttattgtatataaatcatgcctcaataaagttgtttaagaaatatttaaaagaagaaagaagagaaaagggaacaaaggataggacattaaaaaagcatatattgtattaagcaagtataaacaccaaaatgtcagttattacattaaatctaaatatgctaaaatgctccaattaaaaacaaagtttgggccggttacagggcctcatgcatgttactgcagcactttgggaggcagagacagacagatcacttgagcccaggagttaaagaccagcctaggcaacacagtgaaaccctgtctctaccaaaggaaaaaaaaaaaaattaggcatggcagcatgtgcctgtaatcccagttactcaggtagctgaggcaggaggatcccttgatgctaggaggccgagactgcagtgacctgtgatctggtaccatactccagcccgggcaacagaatgcaaccctgtctcaaaaaataaatagaaaataaaataaaataaaaataaaataaaataaaataaaaacaaagtttgttatgccacctaccagagaaacagaaaggctaaaagtaaaagaatgggaaataatactcaatgtaaacatataccaaaaggtagtataactatattaaaatcagcaagagcaaagaaaaagcattaccaagccaggcatggtggctcacacctctaatcccagcactctgggagaccgagacaggtagatcacttaggtcaggagttcaagaccagactggccaacatgatgaaaccctgtctccactaaaaatgcaaaattagctgggcatggtggcacaggcctgtaatcccagttactcgagaggctgaggcaggagaattgcttgaacccaggaggtggaggttgcagtgagccaagaatgcaccattgcactccagcctgggtgacagagtgagactctgtctcaaaaacaaaacaaaacaaaaacaacaacaacaacaaagtactaccagagataggcactttaataaggataaaaatggcaaactggataatgttaatgatcctaaatttgaaaatatctaataaaaacttcaacatacataaagcaaaaactgacaaggctaaaaggagaaataaggaaatccataatcataatgggagattttacacatctctttcaaaaactgatatatgcagacaaaaattagtgagaatacagaatattttaacacaattaaacaaaatggacacacctcgagcagtatatctagtaaatgcactctacatgtcctttacaaatacaaatagaacatttgcaaaatgaccagctgctaggccatactgcaaatgtcaatacatttaaatgaactgaaatacagactatgttccacatcagaaagatagttataaaatccccatgtttggaaaataatatacttctcaaaaatgcatgggtcaaagaagaaatcgaagtggatatatgaaaatatcctgaaagataatgaaaatactacacatccaaactgatgaggtacaactaaagccatgcttactgaccattataaccctgataccaaaacctgtcaaaaggaaaactgcaggccagtttcactaacgacgatgtaagggaaaaaccacaattcaaaaattgaattaaatttaaaatttgtatcagaaattaaaagttggtttaatatttgaaaattttattcaatgcaattcaccacattgataacataaaggagaataattatttgataacataaaggagaataatgatatgaatacctcaattgatacagaaaaagcatttgataaaatttaacatccattcatgataaactcaaataaaaaaatgaatttctagtaacaggtatccacagaaaacccactgcaaacatcatacttaatggcaaaatgtttaaggttttttccctcttagatcaggaacatgctacttctattcatcatactggaggtctcaggcagcagagtaaggcaagatatatagaagacataagattggtaagggtaagataaaagattcatttgcagatgatataatattcacagatgactgtacagtatacaatccaaaagaacctaaatgtaaattatcaactattacagcaatatacatgaataatataaaaatctatcttatttttatattacagctacaatttttaaatgcagttttaaaaacactacttacaataccacttttaaaaacgctaaggaataaatctaacaaagttatgcaagacggctacatagaaaactgtaacacactcttggctgggcacagtggttcacacttgtaatcccagcactttgggaggctaaggtgggcagatcacctgagatcaagagtttgagtctagcctgaccaacatggtgaaaccccatctctactaaaaataccaaaaaaaaaaaaattagctgggcgtgatggtgggcgcctgtaatcccagctactaggggaggctgaggcaggagaatcgcttgaacctgggaggcggaggttgcagaaagctgagatggtgccactgcactacaatctgggagacagagcgagactccatctcaaaaaaaaaaaaaattacaggaaaataacttccaatttatacttctatacccagtcaaactaaatatatgtgtcagaataagacattttctgatctgcaagctttaaaaaaaaaaaaaaagttacctcccatgtactctttcttgggaggctaccagagagtgtgccccaggaaaaaggaagacaattgaggaaacaaggtctaaaacatgagaaaagaaagaaaaatgctctggatttggtgaagagaagtcccaagaactcagctgtatagcagacctagtaagcagctaaactaaactgctaaactgctaaactgcagtaggggaatgaagggcttcaaatgatttctttaaaaaaaaaaaaaagttttagaatttaggaacaaattataagtatacagaaagcaggccgggcgcggtggctcacacctgtaatcccagcactttgggaggccgaggtgggtggattacctgaggtcaggagttcgagaccagcctggccaacatagtgaaaccccatctctactaaaaatacaaaaaaattagccagacttggtggcgggcacctgtaatcccagctactcggggggcataggttgcagggagccgagattgcgccattccactccagccgggcaacagtgcgagactccgtcccaaaaaaaaaaaaggtatacacaaggcaaaacaatttaaaaggatgcattatacctgacttcaccaccatgcgatacaccaatgtagcaaaatttcacttgtaccccattaatacaaatttaaaaacagtaaaataaattaaaggatgcactattatgctaatgaaagtcaaaagggtatatgtatatatgtgtgtatatatgtatatatgtgtatatatgtatatatctatatatgtatatacgtatatatgtgtatatatgtatatatgtatatgtatatatgtttatatgcatatatgtgtatatgtatatatgtttatatgcatatatgtgtatatgtatatatgtttatatgcatatatgtgtatatgtatgtatgtttatatgcatatatgtgtatatgtatatatgtttatatgcatatatgtgtatatgtatatatgtttatatgcatatatgtgtatatgtatatatgtttatatgcatatatatgtatatgtatatatatacagggtatatgtatatttatccttcaatttaaaaaatggaagaggactgtttttaacactacaaaaaaattatataaaacaaatataattgtacaatatatggccctgctgtaaataataatgctaacatcataatgtaaatacttaacaacagccaaagctgtgatataactacattggtagactagtggagacgagtaagaaggaatcgaatgtgtgaattaaatcctagtctttcaagagcgaagaaaatagatagtatctaaaagtgaaaagaaacagctttataaccatgttatttagaaatactggctctcctgtttcctggatccttctcttgcaaaagaaatagctaagtatggacactgaacagcattaggagtatggaacttagaggtgcaaagcaggcagggcactgctgtttttttgttacaagctccatgatacgcagagatctaatcacagtccaaatatttgacttcacaagcaatttctttactatttatacattgtcttacaaggcatgtactctcatttaaaaataataatttggggctgggcacagcggcttacactcatatcctagcacttgggaggccaaggtaggcccattgcttgatcccaggagtttaagaccagcctgggcaacatggcagaaccttatctctacaaaaaaatacaaaaatgagctgcgtatggtggcatgcgcctatagtcccagatactcgggaggctgaggtgggaggattgcttgagcccaggaggcggaggtttcagtagttttttttcaccactacactccagcctgggcaacagagcaagaccctgtctaaaaaaaaaaaaaaaaatcattagaattttgttttccttgtgaacagctcagcactgtgacaaaagtgccaccattcagtcatcttcccagttgaattactggcaggtatcacatgggttttctcttgaagtacttgtggtttaacagtttacagcagtgataatctcttacatcataccctctaaactgtcaacctgtttagcaaatatgacatttctagacatttacagtttccactgattttattgtttttaaaaataactaaaggctaaattccatgaagataactgtgcatcttatttgtttctttaatcctaaatgtaagacatctaatgcctcaaaataccacactaaatgcaagggtctcgcgcaatctcactgcaacctccgtctcctgggctcaagtgatcctcccacctcagccctgcccccttccccctcccagccccccacaccaccaccactgccaccaagtagctgggattacaggcacgcaccaccacgcccggataattttttgtatttttagtaaagatggagtttcacccatcttgcccaggttggtcttgaactcctgagcttaaagaatccgtctagctcggcctcccaaagtgctagaattacaggtgtgagccaccgcacccagcctaaatagatatcttaaaggataataaagataaaataccttgttgggttattctgacaatacatgttaaccactgaatacttttgtgtcctttaatggggtatgattcagtaaaattaggagcaaatttaagggcttgtgaatacgaaaacttcccattgaaatgaatggcatatgtgtgtgtgtgtgtgtgtgtgtgtgtgtgtgtgtgtgtgtgtgtatgtgtgtgtatatatatatgtgtatatatatgtgtgtgtgtgtatatatgtgtgtgtgtgtgtgtgtgtgtgtgtgtgtgtgtgtgtgtgtgtgtgtgtatatatatatgaataagactttatcctaatcaggagtttttcagtatcaaattacctttgaaaagccaggtaagatttgtttgacttaaatgcctaggtttcataaatactaatggttagaatgaggctaaaacaagtagtgcctaatgaaattttttttaaaagttagtgaatctggctgggcacggcgactcacatctgtaatcccagcactttgggaggctgaggtgggtggatcaagagatcaagagtttgagaccagcctagccagcatggtgaaaccctgtctttactaaaaatacaaaaagtagccgggcatggtggcacatgcctatagtcccagctactcaggaggctgaggcaggggaatcgcttgaacccgggaagcggaggttgcagtgagccgagactgtgcactgcactccagcctgggcaacagcacgagactccatctcacaaaaaaaagaagtcagccaggcgcagtggctcacacctgtaatcccagcaccttgggaggccgaggtgggcggatcatgaggtcaggagatcgagaccatcctggctaacacggtgaaaccccgtctctactaaaaatacaaaaaaaaaaaaaaaattagccaggcgtggtggcgggcacctgtagtcccagctactcgggaggctgaggcaggagaatggcatgaacctgggaggcggagcttgcagtgagctgagattgcaccattgccctccagcctgggcaacagagcgagactccatctcaaaaaaaaaaaaaaagtcagtgaatctaaagaaaaaatataaagtaaggaacactcaggggcatttagatatgccaataatcataaaggaagcaacgactgccatgtgggaaatataacagcatcccacaacccagtctgtcaccagattgccaaactgaagggcatccagggatggcgggtcatgacctgtaatgtgagctgcactatcctagagcccagcgtttactcagtctatcctttccttcaactcgtactgatcatttggggccttgtacgcccatggtaaggaatccagaattgattctatcaactgcaatgagatgaggctggagagttttaagcaaaggatttataagatctgatttgcattaagcatcaaatgtgctgatgaatatgaaaaggctcagtaaactccaaagtatcaccccagcatattttattgccttgacagagggcagaacaaaacgaagggaagaaaataaagcaaactaaaatccaagtagaattgacccattacaaattatgtggccagtagtcatgactcaggcttcccttatgccccatttagggagatggagaagatcaggtctgatggaaaagggagaggattttggctttcgacatactaagtttgagatgcccattagacatcaaagtggaaatgctagaaggcaattggatatacctacccatccagagctaaaaggagaaacacgaatggaaacagaaacttaggatccgtcagcgtatagagcagttattaataacaatacaagctaatctttatagcagtaagctatgtacttatagctgagaaagtatgtttcagtcactattttaagtgctttatatgtacaactcacttggtcctcaccacaaccttggaaggtcaggtcctatgatacttactttacaaataaataaactgaggcataaacagattaaataacttgcctaaagacacatagtaagtaaataccagagctaggtttcaaacctaggtaatctgactctggaactctttaaagccatgagattgcttggcaagtacagacagaaattagactgaggacacagtatttcaatttaagcaatttcctgaatatcaaatggctggcaaggtttcaggctctgcagatacaatgaaaaataagacacagtctcttcaggaagcccagtctaattaactactagctgagagcaactatttactaaacaactattcctatatgccacactggctacgcttttaaaacatattatttcacttaatcctcctaacaactttatgggatagatgttatcatcacctctttagaaataaggaaactgaagttaagagaggttaaataacttaatcttggtcaccctgctaggattcaattcaggtccaccttactttaaaatctgatttttttttccaaggaaattccatcacatgctataccacagatgatccttgaggacattatgttaagtaaaataagccagtcacaaaaagacaaatactgtattactatactggggttatctaaagtagtcaaactcacaaaaacagaaaggagaagaatggttaccaaggactgggagggagaaatgggaagttgttcaatggtagtttcagatttgcaagatgaaaaagttctggaaatctgtttcacaacaatgggaatatacttcacattacttaactatacaccttttttttttaagatacagggtttcaccatgttgcccaggctggtctcaaactcctgggctcaaacaatccgctcacctcagcttcccaaagtgttgggattacaggtgtaagccaccacactgggcctgacctatacacttataaatggttaagatggtaaattttatgtttacatatatatatttatatatgtatatagtttgaggcagggtctcattctgttgcccaggctgcagtgtaatggtgtgatcatggctcactgcagccttgacttgccaggctcaagcgatcttcccacctcgggttcctgagcagctgggactacaggcatgcatttccacacctggttaatgttttttttttttttttttgtagtagagctggggctccaccacactgcccaggcttgactcaaactggctcaggtgatcatcccatcttggtctcccaaagtgctgggattacacacatgagccaatgtacctggcctatattatatatttgtttactacaatgaaaaaattttggctaggcgcagtggctcacacctgtaatcccagcactttgggaggacaaggcagggggatcatgacgtcaggagttggagaccagcctgaccgacatggtgaaaccccatctctactaaaaatacaaaaagtagccaggtgtggtggcacacgactgtaatcccagctactcaggaggctgaggcagaattgcttgaatccgggagacggaggatgcagtgaaccgagattgcgccactgcactccagtctgggcaacagagcgagactccgtctaaaaaataaaaaataaaaaatgtttaaatctggtcttttcctactataccacatgccataacagtataaaaatatgggtaatctgggcaacagagcaaaaccctgtctctaccaaagatacaaaaattaatggggtgtggtggcacacgcctgtagtcccagctactagggaggctaaggtgggaggatcacttgagcccaggaagttgagcttgccactgcactccagcctgggtgacagagcaagattctgtctcaaaaaaaaaaaagggtaagcaaataacttattctgcaggatgggagagaggagcggaagggcacagcatggaataaattaaaaaaaaaaaaaactaagaaaagaaatatttgaaagatgaaggtccccattttatcctcactatagctccaggcagggggtctctacttcaacttctgaaatagctcccacacctatatacaaccatcagttaccacaataacctgccttgcttttgtggctccagaatattccagcagccttgtatctggtgagctttttttttttttttttgagatgaagtctcactatgtcacccaggctggagtgcagtggcgtgatctcagctcacaacctccacctcccaggttcaagcaattctcctgcctcagcctccagagtagctgggattacaggtgcttaccaccacgcccggctaatttttgtatttttagtagagacggggcttcgccatgttggccaggctggtctcaaactcctgacctcagatgatccacccgcctcgacctcccaaagcactgggattacaggaatgagccactgtgcccagcctctggtgggcttttctaggctcctcccattctaagtcattcagcactggaaacaaattaagttgcctaaattgcctcatttatcatgctaaagaacttctgtggctccctattattctcagaacactgattatcaggatgggtgtttaggaacatatcatctaacctctctgagcctcagtttcctcatccatattaagaaatgagtcttgaagcataactcaaaagcttgaggattaaagataacatatgccttgtaccgtactttttctaaaggttatgtgctcactaaaagttagtcctctttctgcctgtctctacacacccagctcggtaaggtatcttagcttaagaaggaaagagcaagtatttctaggatttttttttttttttgagacagggtctcactctgtcaatctccgcctcccaggctcaggtaatcctcccacctcagcctccccacaggcacacaccaccaccatgcccggctaaatttttggagacacaggattttgccgtgttgcctgggctggtctcgaattcctggattcaagcgatctgcctgcctcggcctcccaaagtgctgggattacagggtcttaagtcaggtcttaagaacacaagggggaaaaaggctgctcatctatggttgtgtgatggccaggaaaacatttctcactcacaactgctcctttcgtccacagtcctccatacacacagaccccctagcctttattttattctatccttttcgtcatttgaggaagtgatattcaaattaaatttaaataaagttacactgtgaaaagtctcactcccattttctccccctttagcccaattcccacctcactcccaccaaccactttatcagtttcttgagtatccttcaaactttttatgaaaaagctgtctttaaataaagctaatgttttacaggtgttagcaaggttcggggtgggggagggtggaagaagtagtggactaggtcctattcaacctggtttaccctaaagcagtgtccttcgctcactcaaaaataacaataatcatatgttgggcacctgttataagtcagatgcttaatattaactaccttcagcccttagtatgcaccagaaatgcactaatgctttacacaattgccccctttgatctccacaacaatcttaaaaggtaggttactaattctcatcttcatcttacaagtgaggaaactgaggcacagaaaggtcacctgcccaagcaagagagaggagcagggctttgaacccaggcctgactccagagtccctcttaaccgtgacgctctacactagcaaaccagatatagtctctgcacccgctggaactcagcctaatgtgggagacgggcgagaaaaaggcagacaacaaagaaatacgaaattatagactaagaaagtaatgtaaacgaaacgaattcgcggctgtgacagaataacaatggggacctactttagaaaggggaaggaaagagtgtcaaggaaaggcctgagaaaatgacatttatgaaatgctcgggaaccatttgggggctgcaatgatgaccccctcccccacgcccaatacacgggataaactcgaggcccacagaggctaaaacaaacacgacagggtcccccagacgtgtagacgtggcgcaaagaagggaggatccagaaactgggcccagggttcgtacacgccatcagtgtccacagcagcccagccccgctcggcccctgacaagggacatcaagccagctgcttcccacggccccgctgcagctgagagcgtccgggcagctcacagggaggccttccggccagccaaaagggctttggcccgtccagcggcggcctggaaaggcctcttccccggccccccgccagctcccgcctggtccgccccgccccgcccctcctggtccagcctcgtacctgcaccgcccggaccaggccccggccggtcagctggccctgccgcagctgcagcagaatgttaccaggccgcggccggccgccccatccgccccaagccgccactgtggctgccgaccgtctccctcggccggctccagacccagccgctaccggcgccgccgccatgtctcctcgtcggacaaacaggaagcaagcggcctcggggccgcggagatttctacggggcggcggaggggtcgccgcagcgcccccagtgggccgtcggcggaggcgcaagccgcgtggcagggaccgtgtgcggcgtggaggctactgggaattgtagtcctgcgcggcagcggggtaggtgggaaaagagatgtggcctttcctgcactgccggtttctctggcccccgggcccagcatttcggcgaaatctcccaaggtccacattctcccatttctctcgccgatttgggcaggatgcaggcagctggccaagaaatgatcctgggcttcaggtcaggagtcaggccctcgagtccgcttcctgcctgcttctctctacacgtgactcaccgcggacatcgaccaagtcatcgcgctctgccactgcgcctgtgtcctcgtcaggtcactccatctatagattctgggagcctgatcaatcgtagttcctggggctttctctgcgcccgacaccaaaccatgtctaggggaaagggagggtgtctgggatacagtggtgagcagaacggcctgggatcctttatcacgaaatgcaggttacaggggaagacagcagatccatacacaaagaaacgcagtctcaaactggataagttgtgtaactgggtaggttgttgtgaaattaaataatggaagggaaagggattagtaaattgtgacatcatattctctgtcagatgaaaaccctgtcctaatttctatccaccagatagcatgttgtctctaatactcattttttcagctaacttctgtggcaggatggcactgactccccccacccaacacacacacactttttcccttcctagcagggggcctgtaataaaaatgaaagaggagagctaagtgtgatgtaacagggaatggtgaagattgtgactcataactaagatgactgtaacttactgctcaaaccagaacactttaaagaatgaaaagacacaataaataattacaccgggacggtaggcataaaagtgactctcccaggtgaactggcactatggttaccatcctcacaccccatctaaaaggagtagactcaccatccatcttcatagaactagaaaaaagaatcctaaaaatcatatggaaccaaaaaagagcctgcatgtccaaagcaagactaagcaaaaagaataaatctggaggcatcacattacctgacttcaatctatacaataaggccatagtcacccaaacagcatggtactggtataaaaataggcacatagaccaatggaacagaatagagaacacagtataaaaccaaatacttatagccaactgatcttcgataaagcaaacaaaaacataaagtggggaaaggacaccctattcaacagctggtgataactggcaagccacatgcagaagaatgaaactggatcctcatctctcacattatacaaaaataaactcagccgggtgcagtggctcacacctgtaatcccagtggctcacacctgtaatcccagcactttgggaggccgaggtagtcagatcatgaggtcaggagttcgagaccagcctggccaacatggtgaaaccccatctctactaaaaatgcaaaaattagctgggcgtggtggcatgcacctgtagtcccagctacttgggaggctgaggcaggagaatcacttgaaccctggagacagaggtcacagtgagccgagatcacgccactgcactccagtttgatgacaggatgagactccatctcagaaaaaaaaaaaaaaatagccaaagaagttacagtcaggagatattttgttccctatagaaactgaatataacatcttaaaatttgtccctgagtgttgtttcttagaaactcgaacccccaccaaatggatctgctgataggcaaactcagataagggagagctgagaactaaactttgacttctattttttgttataaatttcttcctagggggcctggaggaggacacgaccataagtcagagctaacattcttttctgcagatcccaaatttttagacaaagctttacctccttaaccaattacaagtcagaaaatctttgaatccacttgtgggcccctggttggagatgtcctgtctttttaggtggaaccaatatacagcccctatgtattgatttatgacttcgcctgtggcctctgccctcctgccattaaaaacctgtaagccggctgggcgcggtggctcacacctataatcccagcactttgggtggccgaggcaggtggatcacctgaggtcaggagttcgagaccagcctgaccaaaacggcaaaaccccgtctctactaaagatacaaaaattagccaggcatggtggcacgtgcctgtaatcccagctactcgggaagctgaggcaggagaatcgcttgaacccaggaggcagaggttgcagtgagctgagattgcaccactgcactccagcctgggcgacagagcaagactctgtctcaaaaaaataaaataaaacccctgtaagccataagggagttcaggtcttaagcataagctgtttgattctcctcgcttggcaccctgcagcaagtgcaataataaatgcctcactttctcttgctgtaatcccaatgtcagtggctttgctgcaccaggtaagcagccctcactttggttcaataacaatacttttcataactttttgcaccagctatgtatcatttctagattcaagaaaaaaaagtcttctaatatgtgaaattaactttaaaaagacataaaaagaaaaggcatttccagggatacaaacagggcattggtgagctgtccgggcagcagccagccttaccagggaatccacagcccagggattccacccagagctcttcctgaggcatatggtgatggatattctcacccttgtcgcggtgaggagacaggatcctgactaatttcacagttcacatggccctccaggtttcccttggcactcatcatgctagggacaaatcttcccacctcagctttgacccaactgcaaatgtcactttccattcctcagttcctatctttgtcagtctagcctggcccaggcattcaccaaagctgggtattcactgggtcaaaaatgacaacctcaaattcagtccttacagataccatgtgaccatgaagtaaggggacatgtttccagaaacctctgtggaaagacactcttttccacttcacctctgctctgccagccttttccgtagaaactagctgaggctaggcgcggtggctcaggcctgtaatcccagcacttttggaggccgaggcgggcagatcacgaggtcaggagttcgagaccagcctggtcaatatggtgaaaccccgtctctaccaaaaacacaaaaattagctgggcggggtgaagcgcgcctgtagtcccagctgccctggaggctgaggcaggagaattgcttgaacccgggaggcggagtttgcagtgagccgagatcgcgccactgcactccagcctgggccacagagcaagactctgtctcaaaaaaaaaaaaaaaaagctgagtgtctctcaccaccagagggcgaagtacctctcccaccagaggtctgttgatgtcaattttaatcagcactagaaaaaaaatgaagctcccaaactggctaattttttttccaccgtaatcccaaatggcttaaccaaacatgatgatgctattcagagaacattaactcttgtaaataaatcgccaaactcatctcaattgggcagacagattttctgggacttttttttttttttttttttttgaagtcttgctctgtggcccagcctggagtacagtggtgtgattatagctcactgcagccgccaagctcctgggctcaagcaatcctcccgcttcagcctcccaaagtgctgggattacaggcatgagtcatggcaccctgccaagaagtcactttaatcaaagcaactggcactgttatatcaggccatggtaacagctgtcccatgcaactatgcattgtcctgtggtgtcattttttacagtgatttttttttacattacatttctaatgtacaacctctccatgatttgtcttttaaatgtttgttaagtactatcttatgtgccaggcactgttataggtgctgtggatattgtgctaaataaaataaacaaaatttcctgccctcatggggcttatacttctgggtaagatctaccctttattgagcacttaccattggccaagcactttctttgcactatcttattattctcgcagcatttttggggaagtttttcaaatctacagaaagttaaaagatacaccattaacactcatataccctttgcttagacttgtcagctactaaaactatattttatctttctctctgtgtatatatacacatatatgtacatatatgtgtatatatacatatacatatatacacatatgtacatatatgtgtatatatacatatacatatatacacacgtgtatatatacatatacatatatacacacgtgtgtatatacatatacatatatacacacgtgtgtatatacatatacatatgtacacacgtgtgtatatatacatatgtacacacgtgtgtatatatacatatgtacacacgtgtgtatatatacatatgtacacacgtgtgtatatatacatatgtacacacgtgtgtatatatacatatgtacacacgtgtgtatatatacatatgtacacacgtgtgtatatatacatatacacacgtgtgtatatatacatatacacacgtgtgtatatatacatatacacacgtgtgtatatatacatatacacacgtgtgtatatatacatatatacacgtgtgcctatatacatatatacatgtgtgcctatatacatatatacatatatgtgtatatatacatatatacatatgtgtatatatacatacacatatatacatatacgtacatatgtgtatatatacatatacatacatatatatgtgtatatatacatatatacacatacatatatgtatatatacatatatgtatatatacagctctttccatatatgtatctctctctatacttcatttatacgtagagagggtttgtgttagttttgctaaacatttttttttttttagacagggtctcgctctgttgcccaggctggagtgcagtggcacgatcatagctcactgtagccttgggctcctgggctcaagggatcctcccatctcagcctctcaaagtgttgggattacagatgtgagccactgcacccatcctgctaagccattttttgctaaaccatttgaaagtaaattgtagatattatgacacttcacctgcatattttagaatgtatctcctaagatcaaggacatgctcctaaaaactatgataccatcacacccaagaaatttaatattgatacaatttatctttttttaaatttatttatttaagacagggtttcactctttttgcccaggctggagtgcaatggcacaatctcagctcaccacaacctctgcctcctgggttcaagctattgttctacctcagcctcccaagtagctgggattacaggcatgcgccaccacacctggctaattttgtattttcagtagagatggggtttctccatgttggtcaggctggtctcaaactcctgacctcaggtgatccgcctgctttggcctcccaaagtgctgggattacaggcatgaaccaccatgcccaggctttttttcttttttgacatggagtcttgctttgtagcccaggctggaacacagtggtgtgatctcggcttaccacaacctctgcctcccaggttcaagcgattctcttgcctcagcctcacgagtagctgagattacaggcacccaccaccacacccagctgacttttgtatttttagtagagatggggtttcaccatgttggccaggctggtctcgaactcctgacctcaagtgatctgcccaccttggcctctcaaactgctgggattacaggcatgagccaccatgcctggccattatttatcttataatccatattcaaatatctgcaattaccccccaaatgtcccttacagtctcttccccccagtccagagttcagtaaaggatcatgcatacatttgaaagctatgtcttgtcactgtcttttaatctagaagagtccctcatctcttttgtcctttcgggatattgacagttttggggtccgggccagttgtactgaataccctgacatctggatctgctttattgttttctcatgatttggttaggattaagcttttatggctagaatattaaacaggtgatggtgtgtctttcccattgcttcatatcagaaagaaataatgtaaatgtgtcccattattgatgatgctaagtttgatctgttggatcaaacttaatatgtcttcattggaaacatacattttggggttaataagtaatctgtggccttcaagactacgagactgtcttgttctccacccacctttcacccagtaatgtttgtgtttgtttgttttgagatgaagtctcgctctgttgcccaggctggagtgcagtggcgcaatctcggctcactgcaaccttctgttcttcttctcttgcctcagcctccctcccgagtagctgggactacaggcacgagccacttcacattgcaagttttgcttttttttttttttttttttttagtagagatggggtttcaccattttggccaggctggtctggaactcccaacctcaggtgatccacccgccttggcttccgaaagtactgggattacaggcgtgagccaccgcgcccagcccccacccagtagttttttttgttttgttttgggttttttttgtatttttagtagagacggggtttcaccatgttagccaggatggtctcgatctcctgacctcgtgatccacccaccttggcctcccaaagtgctaggattacaggtgtgagccaccacacctggccaacccagtagtttttatcatcccttgatgatccctccctggattatcatgctggtggttgcaaaattgtaactttctaattctaccattgcttcctcttttattaggtaatattcccccccaaaaggagctcccgccctttttctggggtatcactatggactcataaacttttttttattttatgtgttataatccattactatggttattctattttcccttggttttattagggtatcatttacataaaatgaaatgcatagatattaggtaatatgtaatctgatgaattttgacatatgtatatacttgtgtaaccaacacctgaatttaaccaatactcccaatggatatagaaatttccattactccagaaagttctcatgcacttgttacttactaactccaaaggagaaaaatgtacctctccactgttctaattttatcatcatagattaattttgactgttccataacttcctataaatggaaccatctaatatatagtcttttgtgtttagcttttttcactaaggatgatgttttctagattcatccatgttgatctgcatgtcagtggttcattcctttttactgctgggaagtgtaccgtctcaggaaatgatagtccagggccgggtgcagtgcctcacacctagaattccagcactttggaaagctgaggtacaagaatcgcttgaaaccaggagtctctacaaaaaattttaaaatgagctgggcttggtggcacacacttgtagttctagctacttgggaggctgaggtgagaggactgcttgagcccaggagttggggtctgtagtgagctatgatcccaccactgcactccaacctgggtgacagtgtgagaccctgtctctgaaaaaataaaaaagaagatgataccctaagataaaggcttcagaagcagctctctctgaccgtctcctgcccttctgtctctggcctcttattctcccctgaggctagtcatagaaactagaatccctcttccccaaggcagggtttagaaaccagaaactggcagggcgcagtggctcactcctgtaatcccagcactttgggaggtcgatgcaggcggatcacctgaggttaggagttcgagaccagcctggccaacatggtgaaaccccatctctactaaaaatacaaaattagccaggtgtggtggtacatgcctgtaatcccagatactctggagactgaggcaggagaatcgcttgaatgtgggaggcggaggttgcagtgagccaagattgtgacactgcactccagcctgggcactagagcaaaactccatctcaaaaaaaaaaaaaaaaaaaaaaagaaaccagaaaccttcctccttccccttgccagcggtgaaaccaaacctaaaaatattactctaactccctccccctaaaccaccacacctttctgtgcataaactggccatcaagaaattatccaacctacctggtttgactgtaggtcataagacccccattccagagagggtcctgctgcacacccggaaggaaggacaagaacaaaactctgtctcaaaaaaaaagaaaaaaaattctgtgtgtgtgtatttctcattctttttgatgctcaaattgtcccaaatttgaccattggtagtcctctcaaattaattcctgtgtcatctttgggacaatcttaattttaaatgggccctgtgggacttaaacttgtccaacactatgatcggttctgagttcagaaaatagtctctctaaatttttgttccaatctccacagatgtagattcttacctcattcccaaagctagtcactccttaatctacaacagccattcttcagcaacactgaagactcttatgacataaagttgaaacttctttccccaaatgatgcatgcatccgacacacaggcagacacacacgtgcatgcgcagacacacaggcagacacacacgtgtgcgtgcggacacacaggcagacacacgtgcatgcacacacacacacattttgccagtggttcttggattgtttacagtgatctctaaatcactgaacgcctactatgtattagagattgtgctagatgcaaagaaatgcaaagggaagaaaataagaaaattaacatttaaaaaagacctaggccccatgtggtggctcacacgtgaaatcccagcattttgggaggccaaggcaggagggtcacatgagcccaggagttggacacaagcctgggcaacatagtgagacctcatctttacaaatatatatatattttttaattagcctggcatggtggtgcatgcctgtggtcccagctagttgggaggctgaggtgggagaactgcttgagccctgggggccaaggctgcagtgagcagagattgcacagtccagcctgggcaacagaacgagaccccgtctcaaaaagaaaaagaaaatacctaccatgtatgttccggacattgtactaagtgtttgatacatgtcatcttaacaaagatgcataaaatagagatttcataaactaacaaattatcacagcacactagaatacatactattgtaaataaaggcatgtagtcactgaattacattcattcaccagatatttcttgaaaacttcctatgtacaagctctgccccaggcgtgggggatacatctgtgaataagacaaatgcagcctgtgccttctagggctcaagtctagtggaggaaggcagacacataagcaattaccatcagagctccaacccacacaaacatttttaaaaacatattattgtagagacaggttctcactatgttgcccaggcttgtctcaaactcctggcctccagcaatcccctcacctctgcctttcaaaacattgggattgcaggcgtgagccactgcatctaacccaaaaatatgtttcaaaaagaaaaacaaaatctaaaacccactgcctct

SEQ ID NO: 374 - DNA, 23963 bp, Homo sapiens
gtacatatgttcaagcaatcctcaacaatggtgctgagacctgtcactggggaaaggacagtttctccaacaaatggtgctgggaaaaatgatattcatgtgcagaagcataaaggaagacccttgccttacaccacatccaaaaattaactagaaatgaaataaggacctaatggtaatacctgtaactgcacaacctctagaagaaaatacaggaaaatttgaaattgcatatctgacttttcagatatgacaccaaaaacacaggcaaaccaaagcaaaaacagacagacagaagtacatcaatcataaatactttcaggcatcaaaaaatgctaacagcaaagtgaaaaggtaacctacaagctgagagaaaatatttgcaaatcatatctctgatacagatttttatctagaataaataaaccctacaactcaacaagaaaacaattaaatactcccacttaaaaaaatgagtaaaaaaggtgctgaagaaaaaaaaaagaaaaaaatggtaaaggacttgagtagacatttttctaaaggtggttttcttttctttctttctttcttttcttttttttttttttttttgagatggagttttactcttgtcgttcagggtggaatgcaatggcgcgatctcggctcactgcaacccccgcctcccgggttcaagtgattctcctgcctcagccttccaagtagctgagattacaggggtctgccaccacacctggctaatttttgtatttttagtagagacagggtttcaccatgttggccaggctggtcttgaactcctgacctcaggcgatccgcctgccttggctccccaaagtgctgggattacaggcgtgagccaccacacccggccttaaagatggttttcaaatgaccaacaagcacacacaaacatgcttcacatcgctaattatcagagaatgcaaaccaagtccacaatgagataatatcctcacatccattaggacagcgactatcaataacaagtgttggcaaggatgtgaagttggaacacttgtgctccattggtgggaatgtaaatggtgcagcctatgtggaaaaaagtgtggaggttcctcacatcattaaaaatacgagtaccatatcatccagcaatcccactcctgcatgtattgccaaaacaattgaaaactgggtctggaaaagatacttccacatccatactcacagcagtactattcactgtagccaagaggtggaagcatcctaaatgtccatcaaaagatgaacagataagcaaatatggtatgtggtatgtatgtataagaaaatattggccaggcacagtggctcacgcctgtaatcccagcactttgggaggctgaggtgggtggatcatgaggtcagaagatcgagaccatcctggctaacatggtgaaaccccgtctctactaaaaatacaaaaaattagccaggcgtggtggcaggcacctgtagtcctagctactcgggaggctgaggccggagaatggcgtgaacctgggaggccgggcttgcagtgagccgagatggcgccactgcactccagcctgggcgacagagcaagactccatctcaaaaacaaaaacaaaacaaaaatacaaaaacaaaacttgtacaaaaacaaatgtgtgtagcagctccattcatcattgctagaaactggaaacaactcaaacaccttcaccatcaatagggcaaactgttgtacatccacgcaatgaaacttctcagcaattaaaaggagcaagctgttgatatgcttaacagcatggattaatatcaaaggcagtatgcggaatgagtgaagccagtctaaaaaggctgcatactatgcagttccatttatgtgatattctagagaagacacaactacagagatgcaagaaagattgaggtccccagaggtgaggggctgggggaggatttgactgtggagggtaagcagggggggttgctggggtggcagatctgctctgcctgttgacgacagtgatggttacacaaatctacacatgtggctgtgtgcggtggctcacgcctgtaatctgagcactttgggaggccgaggagggcaaatcacctgaggtcaggtgtttgagaccagcttggccaatatggtgaaaccctgtctctagtaaaaatacaaaaattagccaggcatggtggcaggcacctgcaatcccagctacttgggaggctgaggcaggagaatcgcttgaaccctcaaggcggaggttgcagtgaacagagatcgcgccactgcactccagcttgggcgacaggacgagactctgtttaaaaaaaaaaaaatctctgcacatgctaaaatccacagaactgtccatgaaaaaaaccactttttttctgtgtgaatttcaaaataaaataattaaaaaaatcagaaagagactcacgttaaaaaacaaagaatgaaaaggaaaatatattttccaaaagaagttgctgtgaaatatgaggagaaacatcaaatgtgaacacacaaagatgcttggtgctgataacaggaatgatcatccttagggaaaagaaaatcaccaccattgagctggccacaccaaaacaattgtaaattctaaatatatggagcaaaaactaattgaatttaaggagaacatgagaaatcaacaactgaagcgggattatttaacggagatattcagaaacaaatggatgaagtagagaaaaatatttgagagtgtaagatgtaagtaacatgatcagttaagttcatctaataggtgtttgtggaaatatgcaactaccaaaacccacaaattaagttcaagcacatgagaaatgtttgcaaaaacttttcagccatgtatcagaaaggaactatcaacagattcccatagacagtgtatactcttaggattacaaaggaacttatgaactactgagaaatgaataacagtgacagcaatctctatcaacatttgttggatgcagctaaaggtgtcctttgttgcactcagaaaattacagacataagcattagaaacataaaacatggaaatatggccgagcgcggtggctcacgcctgtaatctcagcactttgggaggtcgaggcaggtggatcacttcaggccaggagttcaagaccagcctggctaacatggtgaaatcctgcctctactaaaaaaaaaaaaatacaaaaattagccgggcatggtggtgggcacctgtaatcccagctactcaggaggctgacgcaggagaatctcttgaacccaggaagcagaggttgccgtgagccaagatcatgtcactgcactccagcctggggcgacagagcaagaccctgtctcaaaaaaaaaaaaaaaaaaaaaaaaaaaaaagaaacatataacatacaaataaatgaaccaagtgttcaaatcaatattaaaaataataacagagcagggcaggagcagtggctcatgcctgtaatcccagcactttgggaggctgaggcgggtggatcacttgaggtcaggagttcaagaccagcctggccaacatggtgaaactccgtctctactaaaaatacaaaaattaggcctggtgcagtggctcacgcctgtaatcccaagcactttgggaggccgaggcaggcggatcacaaggtcaggagttccagaccagcctggtcaacatggtgaaaccccatctctacttaaaatacaaaataaataaataaataaataaataaataagccgggcgtggtggtacttaaaatacaaaataaataaataaataaataagccgggcgtggtggcgggcacctgtaattccggttactcaggaggctgaggcaggagaatcgcttgaacctgggaggcggaggttgcagtgagcgagatggccccactgtattccagcccgggcgacagtgtgagactctgtctcaaaaaaaaaaacccacgaaaacaaaaattagccaagcgtggtggccctctcctgtagtcccagctacttgggaggctgagggaggagaatcacttgaacccgggaggcggaggttgcagtgagctgagatggcgcaccgcactccagcctgggggacagagtgagactccgtctcaataaacaaacgaacaaataacagagcaaaaccaaaatgccaagggaacgtgagacaggagtgcgagctgggagtcggcacacggagaggcagagacactcctcggaggcagaagctggttccttatagagatggaaagaaagaaatggactctggggagactggagaagaacagaaacacaggaggcagaaataaatactgcggatggaagcagagacaaaacaaaatgtaagctgctccaaatcggcggcggagcgagttctggaagagcggcggtgtgggaacctccggtgccttcctctcccagctgcagctgcgttcccaggcaggcctcccgggagccagggacggaggcccaggactccgccaggggtgggtccgttccccttcttggagggagtgtgacccacaggccccacggaaaggcagtgccactcccgtgacattccacaaggccccgctggccggcccctggcctgcccccagagaactgctcgcaggcaatgatgccctgcagcctgagacctgggcaccccggcctttgccccaaggaggctggggatagaagggcttcctccaggattctctgcaggagatgagcaaaacgtccgcagagccagtgactgcgggacccacgacaatctcaggtcacgcctgccgggagaagcagcacctggacctgagcccggggacgggcaaaggaacgcagctcgtgagtggcccagagagcgggaaccagagcgccccgacggcagcggaagccaccgcgggcgccaaaccagtaacgcgccccttgaggacaggaggccacggcgcaaaagcagactgggctcggaaacacgtgctttacaaatggggaaatgagtgagacgatgcaggagagaccgcaaccagacgtaaaaggtgaagaccaccgcgaagaggaagctctcagccagagctgagtgagagcccgcgggcgggagggggccgggcgcgcgggagccttccctgcaaaccccgggcgttccaggagcagggaggcacacggatggaggacaggagaccaagaatggcataaaatttctccgagcagaaggaacgccgcagagtgtgagcgtgagattgctagcgctcacaaattcaggcaaggcaggtgaggagagacacaggcctgcgcatcctggaaagctcttggacttaaaagatgaaaataaatgatcctggaaagatctcgaaagatcaagaatataaagcgcttttgtttgtttgtttttaataaaacgaacccctaaacgcacacagaaaggaagaacaagcatccatggattgttcggagaaaaaggttgatatccaagaatgcggtaccaggccaggaacggaagaaagtgaagtgacctggggggaggcgagcgctgatccgaggagaggagccaatgagaggcactcaccaggcaagcgggtgggcgggggcctggcgctgagcacagacaagtccaagggaagatgcataggagctgatcgtgcagagatggcagcaagtggcaacggaatccccctgcattgacaataaacctccaggaatccccctgcattgagagaataaacctcccggctctggttctgttccgtgtctgttagcggggtttaggggtgagttagggagagggcactgccaccagccctcggatatatttctcctgctgttcactatgtgtaatagacaaacaccaacaagaagagaagaggccaggcacagtcggtggctcatgactggaattcaggcactttgggaggccaaggtaggaggatcatctgagcctaggagtttgagaccagcctgagcaacgttgggagtttctgtctctaagaaaaaaaaaaattacctgggcatagtggtgcacacctgtagtggcagctactcaggaggctgagctactcaggattgcctgagcctgagatatcaaggctacagtgagctgtgattgtactactgcactccagcctaggcaacagagaaggacagtgtctcataaaagaaaaaaaaagaggagaaaagcttcccagacctgcccacaccatggtgtccaacaggtggctgggaccccatgtcctccggtcagctctcaccagggcctcatgggaccttcctgctgggggctgatctgaaatgccctgcttcttcagacggctgagggtttctgcccacccaacctttggcaatgccaggcgagacaggcacctgcagccccaccgtcactggcatcctctgggcaggtgctcagcgttccttagggcccaggagcaagccagacgccgcctttacttttgcaggcaaaatagaactttttaaacttctgcccatctctcttttgcacatacagtatgatagtcttgctaacctactgccagatgagtgaatctgcctatcaccaagcaacaggtgcactgtcccatgagagggatgggggtggacgtacagaactccagggttctctgggcaccctctggtgcttccaggcctgtgaattggcacagcaggaccacagacctccaaggtgcccacctgggggctcagaaccctggcggggaaggtcagtgctatcccaccggagaagagacctagtctagctgagcccctggccagcggcaaggaggaaaggatgaacatcagccacgcctggcactgactgccacagccagagcctcgcccagcccaagaatgtttctgttctaagacttttttcttttttgtattttagaaattatcacaggcaaatgtcaccttgaagacccggtggcagcaaagtgtgagctcagtgtggggcatgagtgttctgaagctgccaggggtggactgcagtgggtgccatgggggctgtcatagcccttggttcttgctattgcaggccacgctggccacgtttccaccgcagtgtcctcagctcctctctggaggggtcgtctttccacctaagccgccctgccctgcagcagcgggaagtgccaggaataagtgccccatggaagcatccccatcccgtgaccggctggagctggtctaaaacatggcagcgccagggactgagccccagttggtcgcaagtggtcaccttgatgctggacccttcaccagtggccttccctgctaacgtcacctccccaaccctacttaggagggtctcctgggaccacctcctaagtaaaccacttgagcttgcatctgcctcatctgcttctgggggactcacactagaaaaacaaaattaatatttttttgttatatggagtggtgtgatttgaaatccttctatggataatgaatgcttgcttatgtctttaaaaaaaatttttttttttgagacagagttttgctatgttgcccaggctggtctcaaactcctaggctcaagtgatcctcccatgtcagcatcctgaggagctgggactacaggtgcgcgccaccacgcccgactccagcatctttgttctcttaatattgagtccagacatggagttaggcaaccgcaggcatgcagattacactccccagcaagaaggctcatcattgacacacatgcagacttaggctgtaccaggcatgtataccaggggggtgcattgtgagtaggtaggtgtgtgtgcgggtgggagactgtgtgtatgtgtgagagagagcatgtggcagtgtgtgtgtaggtgtgtgtgcatgtgtgagagcatgtataggtgtgtgtaggggtgtgtgtgtgcgcacatatgtgtgttcatgtgtgagattgtgtgtagatgtgtgcccgttcctcacagcaaccctgctggtgagtgctcctgtggtcctctctttacgaacaaagaaacaggttaagcactttccggaaggctggtgacccacgagccctgtgtcacacttctcagtctgcctggggccctagctctcagcctggacacttggcccctggtgaacaagtcatgtcggagagaacccgtctggtgcgccatctccaggatacttgtgtccctttgtacatatatttaaaaattcattttgaaagaacaaaaaaatctccactgccctccttcacatctgcgatttcttgattttcaaacactgaaaggctcgttttgctcctggagagattctgctcggtgcctctgccatgcttgggttgggagtgaaagttttcctgacttatttgggatactgtcctcaaatatttcagatgttgggtgtctgcgagggtcccatggttatgagccatgggaagaggcttcgtgtgactcagtgattggagagtttgtgggtggaattggggggtgctgagcttggaaggggaagctgcatggggccagggctctcgggagcagaaatggatgatggttggggcccacgtccgccaggacagagcctcccacctcgagggctgcattcccagggctacaggtccctggtccacccatcatgaggtggccaggacattggatggatagggcagatgaatggacaaacagcccaggcaaggatgcagggagacccacagccgcccatgccaggccctccaagtgggcaggaacaggtttcccagcttcttatgtgcccacctcctgttcctgccagcatctccctgcacccacgctcagcgctctgcagtccaatctctgtctttcccaaggagaccctccccactgcttagatgtgtcaaaaatccttttccaccaggttaatatttttactatttacttattttttcttctttttacaaacagagatgaggtatcactgtgtttcccaggctgttctcgaacacctggcctcaagtgtcctttctcctcggcctcccaaaatgcttacagatgtgagccactgcacctggccaatttcatatatatgtattttttttaactttttaggttttctatccaatagcaaataaccaaccaatcttgaatttttacacatatcctaacctttctggaatctgcatggtagcacagggtgagggagatggcttactgctcacccatctttgtagggtgaggtctgccctgccctccacatgtggcccgtggacacccaggttggttccgcctcggctcgcctgggccctgctggcctggctcacttcaggaccaccctgtagcctcacccaagaatcatgtccaggtgggagaggaggagatgaggatgctggtctggcgggaggtgggcagtggttacttggtgtggccggggggagaggcggtcgctttgaaggctcagcccccaggaggcctgtccagcttgggtttgtggttcctggggcatgtttatcactgcggtgcagtggcctctcgtccctcactgtggtcggcctcctcatgtcccagcagccccagtgtctgcacagaccatggcccctggacaagccatgggaaggccagggtggggccaaggatctcggagaccagggtcggctctgccttgctctgggggtgatgatggaggcgccagtgtccctctctccagcgctcctctctccagtgctgccactgagcccaggctgctaaaatgggggagcttggaggatccctctgagacccctgaggcgggagccctgcggtggccccactgctgcagccctgacgccgtgtccccgctcctgtcctccccagtagctttccaaacgctcctgcccagggccctgcctgtcctaagctgaacctgagacctgagggcggctctgcaggaggcccctccaggacatcacgcagcccctcaggcctgttggacatcgtgcctcttgtggtttggcccttgctaggtccaacatctccccagcttcccttgtggctccccctcccagcagacctcccagggagcgggtgcaagcccctctgtccccacagataggcctgcccagagctgggggagaaggactttatttggagtcaggtgggtgggagcagggaagggtcatggctggagggtaggtccaggtggtccaggctctgtgtctggtggtagggtgggctctggaggtgcagacccgggggctgctgtgctgggaagaggagcagaggtcagggaggctgcagggtagggcagaggccagggccagagctccctccccaggctctgcagcccccacatcggccactgctgggcaacctcggggctccagagcgacctcagctcctccaatgactgggcaggcctctgagcatccttggtgggtggatggtggggagtggaccgcgtggggacaggtgcagggggcgatgggctgagctgacacctgagggagccggagggaggcctcgctgtggaaaggccgaggaggaccctcactcgggctggcaggtgcaggaatgataaaacaaaggacttcccgaatgtcccaggaactgtgggtgggcagactctgaggtgccaacctcgtgcctgaccctgggggggtctccctggctgtgtgggatgggaggggccagagcagatgtaccctcgaaccccgggaacccaggactctgggcttgtccagtgccctcctaaaggctcactcaccctagtgttcgggaacgcagcttcctgcagagaccaagaaaaacccagggattagaaggcgccctagaccagggcccagaccccatcgcagcccagagctcagagccccagagcccatcgcagcccagagcgcggagccccagaccccatcgcagcccagagcgcggagccccagaccccatcgcagcccagagcgcggagccccagaccccatcgcagcccagagcacagagcctccaatgaggaggacgctaaacagggcccgggagcccctgcgaggagactcggggcacacggggaatgcgggggacatgggaggacatgggggtcatgggacactggagatagcagacagacacagcagagggacacaggggactgggcacagccatcctcacccgtctgcaggggcgtgaaaatgtcctcctccgagagtcccttgcgctgcaccaatttcttaaattcttccagggcctcccggttggtatcagaattcctacctgcaggtgaggtggccaggtgagccgacgtggggacagcggcacggccctgcagggagcagatgccgaaaggagacgaccacggcccagcaccaggacagggggagaggcctgagagtggatcagagctcgggggtggggctggggacagaggagatggccactgcccagcaccaggacaaggggagagacccaagagtggaccagagctctggggtggggccggggacagaagagatggccatagcccagcaccggacaagcaggagaggagacttgagaatggatgagagctcaggggtgggactggggacagaggagacagtcactgcccagatgagaggtccccaggaagggggacagtggcggggactctccaagccactcggcaaccccaggggacctgggcagctcccaatgccaccctgcagggtcacagccctcacctggagggaccttgtctcccagaggcaccggccaccctcctgccctggagggtccctgccccatgaagagctctcttaggacgcttaaggtgaccctcccccttaaggtgaccctcctacacccgagaccccagaagtggcccttggcaggttcatgtcaccgagggccatgtctgtccctgcctggcccatcccattcccacttcaggtacttggaccggctgcccagcggtgcccggcacatgaaagccggcacagggggcttccttttcccccatgccagggcatggtggtgctggttccaccggcttccagaggcagagaccgtggggcaggacacgcagaccccagcaagcccctcacccacaagctttcccatgtggagcaggcccccatggtgctggtctttgcagtaaaagatgtagtggtccctcctgggcagctcctgcaggtacatgagcttcctgcccccatctgtagatgacagagaaaatgggtcattcccagagagaacactcggggccacatgaagaaacactcgggaatgtttcagcggtcacccaggtgccctggacagcctgagccaggcctggctgctccgcacagtgtggacccggacacggaggcaggagcctcctctcaggaaggtcccaatgcaagtaatggagccacaaggccagagcacgtccaggactagagtccggccttcccagctccagcagctgctcctgccccacttccctgtccctaaccctcatcttccccctcagcctccccatctctaatcctcagcttccgcagcactaaccctcggcctccccatccctaaccctcggcctcctcatccctaaccctcagcttcccgatccctaacccttggcccccgtccctaaccctcagcctccccatccttaaccctcagcttccccatccttaaccctcagcttccccatccctaaccctcagcctccccgtacctaatccttggcctccttgtcccaatcctcagcttcctcaatgtgtcaatggctagggcctcccagagggcaggcgtgatctggtccatctcgactgcggacaagcctgtcacacccggtgtctgatgtcagggccaccagccccccaggaaggagaggccagcccctccttggaggtgggcagagctggggccctggcaaaagggcagcctgggcactctctacctgtggaggctggtgcactggggttggcggtgggggagggtgggggtgggagtgggggaggggctcacaggcgctgtatttgccaggctcctccgtcttccgcatcaggattttcttctggatgcacctatcctccctcctggaaaacaggagacacgcgggcagcggctcccaggacacccatggcccatcctcagctcacctggtgcatggccctgacccggcaacctgaaaattccactgccccccaccccaccgagcttcaggatgcccaggctgtttccctccaaggcagggggtgactcttcccaacacccgaaacgtggatggggcaatgggcaccaggtggatctggggaggggagcgaaagtggcctgaggggccctgcagtgggcaacactcacatgaaggtgaacgtggcttccaacttcccaccgcccagggctgtcaccttcactggggacaccttcctgggcctcctgtcctccggaaagtccttatcgaccaccatggccttcacgtaccaggtccctgtgatctggagcaggccaaggccgtgagcccaccatgggtggcccagattctactctgaccctggcactcaggcctgcagctataaccagacacccatggtgcccggctgctgcccttaaaggcaggctgtgttcctgcaccttagttagagctcagctggagtgagttagagccagccccctgctcagggctcccagcccccagtggaaggagggcatgtctgcaccccatggacccccgggccccagcaccaggtgagccctccctccacagggcccaaccctgcgagaccttcgggcttcaggcgtcagtgcagcaggaacccctgagacgagcctgctccggccctgggcctcggggggccgtgtctgctggaggaacaataggacccctccaccaccaccccaggctgggagcacggggtcagaagccagccttcagtgacacctcctaaagcagggcccctggcactgccccctgcccaggagtccgcctggctcctccatccgcccacgccaacccagctcacatcctcctcctccagggtgaaggacagggcagcggccaggccgagcgtgacacccaggaacagggtcttcatctccagagctctgtgctgccgacctcggcaggtcactgggcgtctgaacaaggctgtgctggctcctctcgagatgttctttatagccccctggccagtgtcctgggagcacgtggcacggtgcacccctccccatggtggcaaccagtcctgcatccgggagggggagtgtcctcattgctggcatctggtgaacagcaagtcagtgccagccagagaagaaaagacacacgatgccatccagagtttgcaccacccgaacgcgcccactcagatgagcccagaggactcgagaggacagggcagggtggtgtccatctgcaccccaagccacagaggcagggcccacagcctcgggatactccctcaccaacccctgcaccctcccagggccacggctgggaccctgggcaagtcctctggggaactggccatctccctgctgagcagaaatggactgggctttagaaccagagagacgtggggctgctgccagctgagtcccgcacgccctagagcccaagcttccgcccactctgggacccactctgcattgattttccccacctggaccctgcactcgagcttcctaggggcagaggagggcactattgtgtggctcagggtcagtttatatacggcctcctcgggccatatgagggaccccgccgcctccccgaccccgcttcactccgtaccggagcctggctgtgctgtcctcagaacacgcgatctctctggattgtcctgtccatttcttcctgcacgtattcatcgaccatctccctgttagaatatacattcccctctctcgtcagctttgacggcccccagcccccaggacaggccttgaatctcatccctttagataaacaagtcgcatgaggcaccaagagtcacctgccagcctgtgctcagagttcgtggctgaggtcccttgggcacctggctctgctggcctcatccccagccaacctgagccagaactttgccttctccctcccggaccctgcatttcccaggtgtgtgtcatcttccctgggacccaaggctgacccacgctctgcaggcaggtgctggacccacacaatggcatctttgtgcctctctggcccaagatcagacactctcaagtacttactcaataatactaatgcacactctaataaaccctggggctgtaacgaacgggctggtgtgacccagtccctcacccctcccacggcaagtgctgccgagcagaaaccccccaccctcatccccccgggcaggaaagaatggggcctgggctcttcaggaccagagatgagcaaacaggctggagtctctacatcaacgggaaggtttctctgttctctgtgtttgttgactgtaccccaggcacctcgtatttcattggttgtttgtgaatcattgatctaagcaccttacaacactggtgctgctggctcaatccttgaagaaaatgctggaacgacatgcacagatgcttcagagaacagggctctcccatgaggtccacgctcagtgcgacgggtgctctccaggagtctcccatcatccacccatcttgccctgtgtcccagtctcattcgccaactgtgtccttttagatactggttgggttcaactggtgcagacaccgtcaggagatggtagggctggaggttgggggtcaacccatggcagacatgaggggtgagatctctggcccccagtgctttgtggcctggggcacttctctggatggctgtgttccttctgatggtggctcctgttgggctgccgctaccacacaactttctctctcaccacttccctcacgacccttttctttgaatctcacagtgatcacagcttttcagggctgctaattcctaggtgcttcactgaagtggacagtgtctgggctttactcgacacctgggcataagaaggtttagatggcaccaccaaacaagcacctagaccagagcatgtgctggctgggactgaggcacgccaagaaggagcagagtgggagcttacgatgaatctcagttaaggctgcaagaccaactgcacagtagggaccatcgcctgtgccaccaaccacctattttaattatttcagagacggtggctggccaccatgctgaagcatcagttacaaaatggacttgatttgctgtgtgagtgggtcagtgcagtgcaaggggtggctgaaggcactggtgacccacgctctcggcccacctgccacagttgtagatcgttcctggtgcacggacgtattcacagcttcccaccttaagtgcctgcaccttttcttctgtgcttcccctgacaccgatgaaacccagatgtgcaagtgaatcagcatcctcagtctgtagggatagtaactgatgggataaatggtctggactcttccttctaagtggaacaatcaaatatggttccaccctatttctcagatggtcctcagaaggactgagtcccagttgcccacaatggtaacatcattaacatattttgttggtttttctaccttccaaatctcacttgatctcagacttctggccaccagaatgtgagaaaataaatttttgttctaagccacccagttggtagtattttgttatagcaaccctataaaaataatacaaactctagcatgttaataattatattaaatgtaaatggtttaaatattaaatgacagtgattggcaaagtgaattaaaagccattatacaactatatgccgtctacaagaaacttacttcaaatgtaacaatagagacaggttgaaagtaaaaacatgaaaaaagatatataaacattaatcaaaagaaagcagaagcattatttcaataacaggtaaaatagactttagaacaaagactaattaacagagagggaaattatacaataataagtgggccattctgcaaagaagacatagtaatcctaaacgtgtgtgcaccaaacattagctgcacaatatgtgaagcaaaacagaactgaaaggagaaatttaaaaagccacaattatagttggagacttcaatacccttctctcagagcaactagacagaaaaccagcagggacatcaaagaactcggccacccatcaattaacataatcgaattgacatttgtagaacacaccacctggcaacagcactacacacattcttttcaagtgcaccagaatatataccaagatagaccatatcctggatgagaaaatgagcctcaagaaatttttaaaaatttaaatgatatagagggtagtctctgaccacatggaatctaactataaatcaatgccagaaagataatggaaaatctttcttcagaggcttggaaacaacacacctgtgaataatccacaggtcaaagaggaagcctgaaggtaaatttaaaaatatactaggctggatgaaaatgaaaatacaacatatcagctgggcgtggtggcttgtgcctataattccagcactttgggaggcccaggcgggtggatcacttgcgatcaggaattcgagaccagcctggccaacatggcgaaaacccatctctaccaaaaatgcaaaaactagctgagtgtggtggtgcacgcctgtaatcccagctaatcgggaggctgaggcaggagaatcacttgaacccgggaggcggaggttgcagtgggctatcatgccactgcactccagcctgggtgacagagcaagactccatctcaaaaaaaacaaaaacaggctgggcacagtggcttatgcctataatctcagtgctttggagccccacgtgggcagatcacttgaggtcaggagttcgagaccagcctggacagcatgacaaaacctcatctctactaaaaatacaaaaataaataaataaataaattgctgggcatggtggcgtatacctgtaatcccagctacttagggggctgaagcaggagaattacttcaacccaggaggtggaggttgcagtgagccaagatagtgccactgcactccagcctgggatacagagcgagactctacctcaaaaacaaacaaacaaaaacatatcaaaatttgtgagacacagctaaatcagtgctgagaggcattaaatgcatatattagaaaagagaagtccaaaatcaactatctaagctcccacttcaagaacctagaaaaagaagagcaaaataaacccaaagcaagaagaaaagaaataacaaagataagagcagcaattaataaatcaaaagcagaaagcagaaaaaatcgaaagcagaaaaacaacagagaaaaacaatgaaacaagggctagttctctggaaaaattaataaaattgaggcagttctagaaagactgacaaacaaaaaaagaaagaaagacacaaataaccaacatctggaacaaaacagagactatcactacagaccctgcagacatcaaaggataataagggaatactacgaagagaccttcccacatatatttgacaacataggtgaaatgaaccaatttctcaaaaaacacaatgccaatataagatagataactttaatagctctatgacaattaaagttaacattttaattttaaaagcttccaaaaataattcttcatgtccatatggtttcattagaaaattctaccaaccatttaaaaaataaataacaccaactctgcataatctcagaagatgagagaatatctcccaaccaaaacctgacaacacaaaaaggaaagctgcagaacaatatacctcatgaatatagatacagaaatcctttacaaaatattagcaaataataatatataaaattaattctacaccatgaccaaaagcagtttattccagggatggaaacctggtacaatactcaaaaatcaaccatattaatatgttaagaagaaaaattacatgatcatatcgatcaatgcagaaaaagtatttgactaaattcatcacgcattcaggaaaacaactctcagaaaagtaggaatagaagagaacctccttaacttgacaaagagcatctacaaaaaacctatggctaacatcatttctcatggtgaaagactgatgtgtaactggctcaagtccagctgctcgctgctcagaagtcaaggcatgagaagtgaagtgtggtgaaaggaaagcagcattattcaaatgctagcagtagaggaatggccaggcccatgcctttaaaagaccattcaaactttctggactgagcgaaggggtttaaggaggaaaaggtgtgggaaatatgtgggaatggtgcaggaggatgttggtctgcatcttgttccaatggttatcatgagtcattaatcgtctgtccagaggtctggtttgagtcatcctgatttcagccgggaagtggtaggctacctgtaactccccctaagagggaggattctgcagctgggtctctctgcctggtttgtttcaaaattggcccctggaatttctaagtaagcacataattagataagcgagcactgctcacagaagtgcctggtgggaaagggagaaataaagagtttcgaagtatgtttcaaggctgaaagcaagaaaggaaaaaagtttttaagcacattttgaggctgggatactcagttacaaacgctttctccttaacatcagggacaaggcaaggatgtccactttcaccacttgtatttaacatagtacagaaagttctagtcagagcaataaaggttttttaaaaaggaaattaaagacatacaaattggaaaggaaggaagaaaactgtctgcatctgcagatgacatgattgtctctgtagaaaatcccaagaaactgaaaaacaaaacaaaagaaaacaatacacctcctagaactattaagcgagttcagcaaggttgcaggatacaagataaatatacaaagatcaattgtgtgtctacatactagtaacggaccctaaacttaaaaacacaatactacttatagtggctaaaaaaaagagatacctaggcataagtttaacaacccatatgctggatttgtatgctgaaaataatgcaatgattataaaataaatcaaagaagatctaaacaaatggagagatgtgctatatccatggattaggagactcaacataataaaagcgtcatttctctcaaataatataaagatttaacacaatttctatcaaaattccagaaggaatttttgtagacatagacaagattattctaacatttatatggaaaggcagaggaactagaataactaaaacttttttttttaagaataaagtgggaggaatcaggctaccctttctttccttttcttcttctttcttttttttagagacagagtcttgctctgtcacccaggctggagtgcagtagcacaatctcgactcattgcaacctccacctcccagattcaagtgattctcctgcctccgcctcccaagtagctgggattacagatgcacaccaccatacccagctacaggctaccctttcaagactcattgtatagctagcagatggacagatgcatagatcaatgggacagacaataaagaatcctcaaacagacctgcacgcatatacccagttaagtttttacaaagatgcaaaagcaattcaatggaagatagcttttgtagcaaatgggctggattaactggacatccacagacaaaaccaccaaacaaaaagaagaaccacaaccttggtctcacaccctgcaagaaaattaactcaaaatggatcatagacttaaacataaaacttaaaactataaaagctttagaaaacagaaagaaaatctttgggatatggagctgggtcaggagattttagatgtgtcaccaaaaatatgatccataaaaggaaaaattgttaaaatagacttcatcaaaataaaaaccttttgctctgtaagagaccctgttaacagaataaaaagacaagccaaagactgaaagaaaatattgacaaactacatattcaacaaagaattagtttctatactttataaagaatttttcaaaactcaacagtttcaaaaatagaacgtaaacaaaagacatgaagggacacttgactagagaggatatacagatggcaaataaacacatgaaaagatgctcaacaccattagtcatcagtgaaatgcaaataaaagccatgatatatcagtacatacctattaaggtggctgagataagatcatagtgatcacactgaagcctggtgaggatgcatggaaactggacagtttctggaaaatggcttgacaggtttaaaaaaaaaaaaccctgcaacaagcatagaaccccgcaatagaacccctgggcctttgtcccagaaaaatgaaaactgatgtccatgcaaaaacctgtacatgtgtcatagcccaaatctataaacacagacatcctccaacaggtgaatagttaaacagactgtggtacatccataccatagagcactactcagaagtaaaatggaataaactattgataaatgcaacaatgggatgaatctccagagaatgatgctgcacaggaaaaaaaaaagccaatcccacaattttatgattgcaatagacgacattcttgcaatgagcagatttcaggagtggagaacaggtctgtcattgctggggttggggctggagcaagccaggtgaagatacacatgatagctctgtgtggctttttacaactgcatgggaatctacaatgtctcagggttaaatgtttaatttaaaaaccacaataagcataaatgcttaaaaaaaaaaaacctagagccaaagactcagcaactccactcagaagcatcatttcaacagatacactcccacacatgaaccagcagaagggttcaattgttacttacaaatcttggaaatgcctcaaatttccatcaaaataacaatgactgaataaaggttcatttttatgtttgatttttgcagactttctagatgcctctcattctttggggcacaaggaatacatcgatcaatgaaacaaatgtcctgtgctcggggggcttatattctaggtgcaggggacttaaaatgaacacaataaataagtgaattgcagtgccagctatcaatgtcttgcctccagctccacacgtacccttcatggccggttccgaggcaatggagctggagccagcaggcgcttctcttgtgcacctggtgcaatgctaagctttgttggttgaggcgtagggagaagcgcctcctagcatgggtccaggatgactggttccagatgcttccatttcttcctttttctttctcttcctatgcaaatggcagtggcacaagtcggggacgtctggcggcacacaccacattgaattcaggggaccgcccccagatggcttcctattgagattcagtggcatctgcacctgtgggttcccagtgactcttgcaggcttcccagccccagcccacctgccttgggtggggagagaggcttcctgcttgccagacccagcctacatttccctgcctgctggcctctgccctgaccgtgggccagctgtggctgggacaacccagcaaacttctccagcttcccttgggagaaccacaccttctcccgtgaggtctgaacccagacttgtggaaaggatccccacccctgtttatttcttccttaactgccctcgtgcaatcctgagccattctttgtggttctctttaaacctctagagctgattgttcattgtgcaagcaatccctgttcaatctattgtctctggatcctgatgggtcactggttcatacgttattttaaatggtgatcagtgctatggaaaaagcaaagtggacaagttggacaggagtgtcaggacaaggggttatttgtcctttaaatgaattgatgaggaacagccccgccaaggtggcattcaaacaccgaatttaagacatgaaggaagcaagccatgagctcgtcagctggaagaggagtccaggtggcaggagcatccagtgccagcctggaggtgggagaacgctggcagtttccgggaacacacagcagagcagccacagcaaatgatccagggagaccggccacacatgaggctggggagtgggtggaactgccatgtagggattaaggaccaccacgaggacttcagcttctgctctgagtgaaagaccctggagagctctgacaaaggcaagctgtgacttacgtatttaaggggtcactccagttgctgcattgagcacagatttggaggccgaatatagaagcagagaaagcagttagaaaagacgcggcaataacccaggatggtgcactgatttctacctgggcatccaggagaacaggggatggacctaactgtcccaccacaaacagagggaaactggcccccaggtgcaaaacgcttgtgtttagaaactggacacagacagcgcaggctgtgatccctgagaatgggagctaacgagctcagctggatcatggcagctttatgcctggagggaatttcaatccaccacagagagaggaacccaacagagcaaggagtcagacggcgtggacgggacacagattggactctaggcatcgcagacgactagaatgtgggagacaaggaaagagataggagagccctctgcagaggaagagctccagaaacatgcagagtggtcctcaagaccatagctaaataccagtccatgcagacagagggtggaactccacagggccagagaaaatgatgtttgggtaaagaaggattccaaggaactgaagaaaatcaacaccccacaaacacaggtgcaagaattagttgagatgccaagataagaactgtcttcaacaaatggctctgggacaactggatgtccacatgcaaaagactgaggtgggacctcacgccacacacaagctttcaaccagaatggatcaaagacctcaacgtaagagctaaaactgtacaactctaagaagatgtgtaaatctctgtgactttggctttgacaatgaattcttctctatacacccaaatagc

SEQ ID NO: 375 - DNA, 44560 bp, Homo sapiens
gctgggattacagacataagctaccgtgcccggcctccagagcatctttattctcagtttcagcgggaagaagggggaaggttggtaaaaagagaggcacaaagtttaaaaaggacattgcgtgaagaaactaaaggtttctccttctccacactattgacatttgggatcggatcactactcgttgggaaacgtcctgtacatttccagggtgttcggcaccatccctagcctctaccccctagataccagctcacatcctcacagttaacagtgatcaaaaatgtctctgggcagtagaaaatatttcctgaaatgcaaagttttcttaggttgagaaccattgtaatctagccccatctttagagaagaaattgagtaacggatctacatccattgaggaactatcgacaccccaggggcccatgaaatgtaaactcgcactcacaattaaccatctttctccaacgtgtgtatttcatgtagccacactctcagatgcccacccccatgacctacaagtcctaaacagggaaacctgtggcacatgggttcatgtgtgtctgaatctatacgttcagagatgaacaagtactgctctccctatacctgtgaccactcgcctccgcccatcactgaattctgaaaatgtggcctcaggctcacagcagcattagcacttgcttgctctggatctcatcacattgatgatcaagaacaaagtattcactgggttctctgctaaggatacaaaaaaaaccattccacaattccacggccatgtttgcacccaggaaccacgagggctgggttagcccagatggtgggcttgggaaatgttcctggagcaaaaaaaagagccagaagtcatgagagcctgaccccctcccccaacgcgcacacacacacaccactctctacctccaagcctcattttcaggcttctcaaagctaaggtcactcccatgagctaagccgcgcttttctcaatcctcagctcttccacaagaataggaagaactctctcctgttcaagatcctgtggctcagctgcagctctggaagaaagaccccggtgagggtcttgcttttcacaatccccaatcccagaccacatcctgtgccccaaaacaacttccatggtaaccacatccttcaggaagtgaagtcaggcaggaagtcaagtcagaagacggaatgggctgggcatggtggatcgcacctgtaatcccagcactttgggaggcagaggcaggtggatcacatgaggtcaggagtttgagaccagcctggccaacatggtgaaaccctgtctctactaaaaataccaaaagtagccaggcttggtggtgcatgcctgtaatcccagctactctggaggctgaggcaggagaatcgcttaaacccggaaggcggaggttgcaatgagccgagatcgcaccattgcactccagcccgggggacagaaaaaaaaatgtagctgagcatggtagtgcacgtctgtgatctcagctacttgggagtctgaggcaggagaatcacttgaacccaggcggtggaggttgcagtgagccaagattgtaatagtccaatgtgttcaccttgcccactgcctagacagagctgattcgtcaagacagggaatcgcaatagagaataattcatgcagagctggctctacgagagaccagagttttattattattcaaatcagtgtctcccagcattcaggaagcgtttttaaggataacttggtgggtgggtgggaagccagtgagccaggagtgctgtttggtcagggatgaaatcgtgggagccaaagctatcttcttgcactcagttcctgagtggaggccaaaagataagatgggccagtttattgatatgggtggtgccagctgatccatcaagtacagggtctgcaagttaaacgctgatcttagaagcagtttagggagggtcacaatcttgtagcctccagctgcatgactcctaagtcataatttctaatctcgtggctaatgttcgtcctacagggccaatctagtccccaggcaacaaagaggtgtgctttggaaaagggctatcatctttgtttaaactataagtttctcccaaagttcagcctatgcccaggaatgaaaaaggacagcttggaggttagaagcaaaatggagtcagttaaatctctttcactgtctcagtcataattttggaaaggtggtttcaagctggcacaactgcactccaccctaggagacagagcgagaccctgtcaaaaaaaaaaaaaaaaaacaagaagtgaagtcaagataggaggtaaattcggaagacaggaagtggtggtagaagacaagaagtgaagtcatacaggaagtaaagtcagaagacaggaagtgaagtaagaagacaggaagtggttgtagaagacaggaagtgaggtcatacaggaagtaaaatcagaagacaggaagtgacgtcaaaccaggatttgcagtcggaggcaggcaagaagtgaaatcagaagacgggaagtggctgaggggaacgtcttttctctctcctgctcagcccgaagtgaacaggtagcatcaggtgtgccatttcagtgactgggcacagcccaggcacccacatctctctgcagcgcctattcttggaacaccagagacctctacactattttctgttgcttttttccttcattttcagagatgagatcctggattgaatgactactatggaaagtgattgaccaaggtaagtcacaactatcttgttctttaattttggtgttgtttgttatgacttgttagccgtctagcactcatagctttgcatttccactctgcattacttgtatttttattattttgtgatattcgtaataatttattataaaactgtgttatttttggatatttttaagttaaaatgcgattttttaactaagtggcagtatgcaaagcaagtggttcagaactctcccccattaataagtcttctctcctgaaagaaacaattttgagacttcctgttcttaattctgtttaacagcatacttctaaaagaaaaagtgtatactgttattatttattgtgttacaaaaatatacacgcacctttcatgcacgtccgtgtgaagagaccaccaaacaggctttgtgtgagcaataaagcttttaatcacctgggtgcaggtgggctgagtctgacaagagagtcagcgaagggggataggggtggggccgttttataggatgtgggtaggtaaaggaaaattacagtcaaaggggggttgttctctggcgggcagagtcggggtcataaggtgctcagtaggggagcttttgagccaggatgagccaggagaaggaatttcacaagacaatgtcatcagttaaggcaggaacaggccattttcgcttcttttgtggtggaatgtcatcagttaaggcacgaaccggccatctggatgtgtacgtgcaggtcacaggggatatgatggcttagcttgggctcagaggcctgacattcctgtcttcttatattaataagaaaaataaaatgaaataggggtaaagtgttgggacagcaaaaatttttgggggtggtatggagagataatgggtgatgtttctcaaggctgctttgagcaggattaggggcggcgtgggaacctaaagtgggagcgattaagctgaaggaagattttgtggtaaggggtgacattgtgggattgttaaaagaaacatttgtcatttagaattattggtgatggcctggatacagttttgtatgaattgaaaaactaaagggaataaggaaaggagaaaaacaggtattaaaggtctaagaattgggacgactcaggacatctaattagaaagtgcctaaggaggttcagcatagccttgccagcaaagattatttatttattttaagagttaacagtggcggtatggggatagtaccaggagataccagctgtgctggcttggagaaacagtgtaaactggcagtgtaaacaagagcagggcatgtgtgagtagttgagaacggtgaataggagtatgactagacagaagatagtagggatgacaagttttttggggcacaatctaagttggtctggtgtctggaatgagactggggcctaataaaaaggagtgtctacacaggagcttaaatgggctgtatcttgtagcattccaaggacaggcctgaattctggaagcgaaaatggtaaaagtattgtccagtcctttttaagttggtggctgagcttggtgaggtgtgtttttaatagaccattagtctgtcactgaatactaagagcctgaaaaaatgcttggctgatttgactaataaaggctggtctgttagcagactgtatagaggtgggaaggctgaactgaggaattttgtctgacagaagggaatgacaaggctaaactgaagaattatgtctgacagaagggaagaaatgactgcggtggccttctcagaccctgtaggaaaggactgtacttacccagtgaaagtgtctacctagactaagaggtattttagttatcttactcggggcatgttgagtaaagctaatttgccagtcctgggcgggggcaaatccttgagcttgatgtgtagggaagggagggggcctgaataatccatgaggagtagtagaatagctgatgcaacactgagaagtgatttctttgaggatagatttccacaatggaaaggaaatgagaggttctaagaggctggctagtggcttgtaccatagcatagcctgcctttgctggtgtgtggcgattaggcctggtggaaccgccatcaataaactaagtgtgatcagggtgagaaacagggaagaaggaaatgtggggaaatggggtgaacgtcaggtggatcagagagatgcagtcatgggggtcaggtgtggtatctggaataatgtgggaggccagattgaagtccgggccaggaacaatggtaattgtgggacttaacaaagagtgagtacagctgaaggagccagggagcagaaagtatatgcatcaggtgtgagtaagaaaatagattttggaaattatgagagctgtagagagtgagttgagcatagtttgtgattttgagggcctctaaaagtattaaagcagcggcagccacagcacgcagatatgagggctaggctaaaacagtaaggtcaagttgtttggacagaaaggctacagggtgtggtcctggctcttgtgtaagagttctgaccgcgctaaccatgcctaggaaggaaaggagttgttgttttgtagaaggtgctggggcttgagagatcagtcagacacgatcagcagggagagcacgtgtgtttttatgagaattatgccgagataggtaacagatgaggatgaactttgggcttgactgaagtaatgggggctgtctgtgaaaccttgcagcagtacagcccaggtaatttgctgagcctaatgggtgtcagggtcagtccaagtgaaagcgaagagaggctgggacgaggggtgcaggggaatagtgaaaaaagcatctttaagatcaagcatggaatagtgagttgtggaggaaggtattgaggacaaaagagtgtaggggttgggcaccacagggtgcataggcaaaacaatttgataaggcgcagatcctgaactaatctgtaagacttttccggtttttggacaggtaaaatgggggaattgtaaggagagtttataggttttagaagcccatgctatagcaggcgagtgataacaggctttaatccttttaaagtgtgctgtgggatgggatattggcattgagcagggtaagggtgattaggttttaatgggatggtaacgggtatgtgatcagttgccagggaaggagtagagatgtcccatacttgtgggttaaggtgggggaataggagaggaagacgcgaaggaggctttgggttgaggagaagggtggcaatgagatgcggctgtagtccaggaatagtcagggaagcagataatttggttaaaatatctcggcctaataagggaactgggcaggtggggataactaaaaaagagtgcataaaagagtgttgtccaagttggcaccagagtgggggagttttcaggggtttagaagcctggccgtcaatacccacaacagttatggaggcaagagaaacaggcccttgaaaagaaggtaatgtggagtgggtagcctccgtattgactaaggcgacggacttaccttccaccgtgagtgttacccgaagctcggcatccgtgatggtctacagagcttccgaggcgattgggcagcatcagtcttcagccgctaagccgagaaggagtcagagagccttgggccagagttccaggggctctgggagtggctgccaggtgagttgaacagtccgatttccagtggggtcccgcacagatgggacacggcttaggaggaatcctgggctgcaggcattccttggcctggtggtcagatttctggcacttgtagcaagctcctgggggaggaggttctggaggaacgcctggccgctgcggttcagttcccttcttgtgtgctggagatgtggctggggtttgtctcacagtggaggcaaggaattgcaacttttttctattattgtacaccttgaaggcgaggttaattaaatcctgttgtggggtttgagggccggaatttaatttttggagttttatttaatgtcgggagcagattgggtaataaaatgtgtattaagaataagacggccttttgacttttaagggtctagggctgtaaagcttctcagggttgctggcgaacgagccatgaattgggctggatttttatatttgatgaaaaagagcctaaacactatctgatttgggataaagaaaaaggagcattaaccttgactatgcctttagctccagccacctttctaagagtaaattgctgggcaggtggaagagggctagtcactgaacgaaactgtaagctggaccaggtgtggggaggggaggtgataaaaagataatacggtggaggagcggaggctgaggaagaattgggacctagctcagcctggggaggagggagaggtcagacgggtctgtagaaaaggaagattagaaagactcagcgacgcttggggttgagactgaggggacaggcaggagggaaagaaggaagatttgggacgagttgcactgggcacagagactaggaagggactgatgtgtaaaagaatgcctggacgtcaggcacctcagaccgtttgcccattttacgacaagaattatttagatcttgcaggatggaaaaattgaaagtgctgttttctggctatttggaactgctgtccagtttgtattggggtcaagcggcattgcagaagaaaataaggcatttaggttttaggtcaggtgtgagttgaagaggttttaagtttttgagaacacaggccaagggagagaaggaggaggaatggagggtggaaggttgcccatagtgaaggaggcaagcctagagaaaagagagagtagagacacggagggaaggggttcgggagttcttaccttccagaaaagcgggaaaggggttggggcatggatataaggggttggggcacagagataagaggttggggcatggaaataagggatcagggtgcagagatacgaggttggggtacttgcccctctagaaaagcgggacttgccgctaagagtgaaggagaaggggttgggggtttcttgccccccagaaaggtggagaaggggtagagacatggagaggaggggttggggaacttgccccttccccagaaaagtgggacttgccactaagggtgaaggaccaaggcaggcatccctgcgtgatctgacacctctgaagcgtgggtatataatcagagaggcgtccctgcaatgattaaacgccaagggaaggctgccttccctagtccgtgaccggcgccggagttttgggtccacagataaaacgtgtctcctttgtctctaccagaaaatgaaaggaattgaaattaagagaagggagagattgaagagtggaaaggagaaagtggttgagggacagtgagagaggttggagaagagagtaagaagaggtcgcttacccaatttaaacttggtgagatgttccttgggctggtgggtctgaggacctgaggtcgtaggtggatctttttcacagagcaaagagcaagacaggggattgatctcccaagggaggtcccccgatccaagtcacggcaccaaatttcatgtgcgtccatgtgaagagaccaccaaacaggctttgtgtgagcaataaagcttttaatcacctgggtgcaggtgggctgagtccgacaagagagtcagcgaagggggatggggtggggccgttttataggatttgggtaggtaaaggaaaattacagtcaaagcggggttgttctctggcgggcagagtgggggtcacaaggtgctctgtaggggagcttttgagccaggatgagccaggagaaggaatttcacaagacaatgtcatcagttaaggcagtaacaggccattttcacttcttttgtggtggaatgtcatcagttaaggcaggaaccagccatatggatgtgtacgtgcaggtcacaggggatatgatggcttagcttgggctcagaggcctgacagcacctacctaaaaaattccaatagcactaaaagggtgtgtacaaaatgcagtggctgactaaccatctcctccattgctccgcctaagagacacccacttttagctgttttctttaggaacttgttaatattaggtttctaaaaacatgtaaccatgtgaatgagcttagacttactggattcctatcataataggcggggccttagttattctacagcgttgttcttactgttttttctcttccaatgtttatctctatgtctgcatatcaacattcagtatcacattttttttttttgagacagagtctcactctgtcacccaggctggagtgcagtggcgcaatctcagctcactgcagcctcagtctcctgagtagctgggactacaggcgtgtgccaccacgactggctaatttttgtatttttagtagagacagggtttcaccatgttggctgagctggtctcgatctcctgacctcgtgatctgcccacctcagcctcccgaagtgctgggattacaggcatgagccaccacgcccggccagtatcacatgtttatacccacagatattcgcagccgagaattttcgggtaatataacttgcttcttttatttttgttgttgttattgttcccctaaagtttatatttgttttttatttttattttcttttgaggcagggtctcactctgtcacccaggtttgacagcagtggtgcaatcatggctcactgcagcctcaacctccccgggctcaggtgatccccaacctcagcctcctgagtacctgagagtaggcatgtggtaccacacccagctaattttttatattttttgtatatgagacaaggtttcaccatgttgcccaggctggtctcgaactcttaggctcaagcgatcccgcctcagcctcccaaagtgctgggattacaggtgtgagccactgtgcctaggctatactggtctttttaaaatctacttagtttacttgacctctaaaattatttttcctctgtcttctgatagcatctcagtatgattttccactatgttaagacgaggaattgacccattcttacatttggaggcttctctaagcaactttcccattcccccttcacccaagctgtgtgctcactagccctgattcacagccgtcgtcctggaacttcttggtgccatccttctgtcttttcccaagtgactcacctacctcaacctcccaaagtgccgggattacaggcgtgagccactgtggccagccattcttttccttttttaaaacaatttttatcttctttattttaagtagagatggggtctcactatgttgcccaggctggtcttgaactcctgggctcaagcgatcctcctgccttggcctcccacagtgctaggattacagacatgatccactgcacttggcccagtggtacagttttacactcattagatggtcaagaaatgcctaaacgctataataaatatagaactttaccttgagaagacctaacatttccttcagaaagtaaatatgagaggggtggagacggtgcattatcttatttttatgattttaaaaatgtatacagaattgtacatatttatggggtggacagcaatattgcagtacatgtatacaacgtgctatgatcaaatcagggtaattgacatattcatccctgtattttttgagacaaagtcaggcttcgtcacccgagctagagtgcagtggtgtgatctcagctcactgcaacctctgcctcccaggctcaagccattctcccacctcagccccctgagttgctgggagtatagggatgcaccaccacacctggctaatttttgtgtttttttgttttgttggtagagatgaggtttcaccatgttgcacaggctgatcttgttttctaatgtgaagggaagcgggcaacgtgctagttttacactaaggaaaatgaatgacatacccaaactgcctgcaagacccgttctgagagacgaaaggagatttgttagaccgcagtgggagatggagtgagggtgagagtttctggggaaaaccagacaagagcacagagggccaaagggaagcacgggaggattttgcacagaggatggaacagagtcaaccctgagagctgggaaccttagagatccgtctggagcccatattagagaggttgaagaaagaggccagtatgtggtccagccagggtaccatgtcatccacagtgtgcagggaggaggatggggtctccacagattccttccatcccaaatggagggtgccctcagacagagaggcagacagacagacagacactggccgaacggctccctgatggaacaccaggaggaggcagcatggcctcgtttccacagctgtagcctctgccctcctgcttccacgctccacacacgccagtctttgagtcgcctcccatgccatgatccctcccttggatacgaccgtgcctggggttcagcggtcatgaacataacccgcggctgtgaacatcctgtcggcctccatcctgacccccgtttgatttccgggtcagcgggaggggcgggaggggcggaagcggcctctgcacagccctgcccctgtgccgcaggcgcttcctccggctgtgccagtcctctgccagaaaccccgccaggattattaggatcacagccccgaggcatatccggaccaggttgcccttggtgtagtactggcgggcaggacctggaggaatgaggagaggcaggagcaggtgaaagagcccacctccaggaccccctccaagccacatctgggcttctcagagatcctattattctctactagctaggggatgccgctcactttcctggagggtccctcccttcccgagtaggggtcagggccagatgaccccaattctctaagtagcacctctccctcctgtgctctcacagggctctgagacaactcctccccagacacagatgctgcctcgttatctgatgcattgcaaaagagaggacagttataaggggtggggaagagatggaatctctctttctctgaccctttttaaaatctcaaccttcccacctgatcttaatgcccaattctgaaccccatacgctgatattctgcctttactctacacactggaacccaagatctgagagctgcagcccctgcgtagacaaaggagttggctttggtgaagagacgggtgagaaggaagggggtctggagaggatgacttactcaccagctggagagtctgactcctttggactggcggtgatactcctagaagtctctgggaaccaaacaaaggctaagtgtgaaatgaaaccatattcccgccccctgtcactgtgcctactccgaacacacacacacatggggaggcacaattccacagcatttaagaaaagcatgggccgggcacggtgcctcatgcctataatcccagcactttgggaggctgaggtaggaggctggcttgagtccaggagttcaagaccaacctgagcaacatagaaaaaccctatctctacaaaaaaatacaaaaattagccaggcgtggtggcacgtgccagtaatcccagctactcagtggaggctgaggcaggaagatcacctgagccctgggaggttgaggctgcagtgagccaggattgtaccactgcactctagcctgggaaacagagcgagaccctgtccaaaaaaaaaaaagcaagaactgtagagtcaggctgtcctccagatttgaaccccaactctatcacctattagatgtcagttatctggcaagtgactcagcatctgtgagccagttccccatgtgtccaataaaattaacaagatcccttataggttgatgtgaaagtcaagataataataatggtagaaatataaagcaccgtgcttgacatatgagcacctcatacgtgccagcttttttttttttttttttgagacagagtctggctctgtctcccaggctggagtgcagtggcccgatgtcggctcacttcaacctccgcctcctgggctcaagcgattctcctgcctcagcctcccgagtagctgggactacaggcgtccgccaccacgcccagctaagttttgtatttttagtagagatgggatttcaccatattggccaggttggttttgaactcctgaccttgtgatccgcccgcctaggcctcccaaagtgctgggattacaggcgtgagccactgcacccggcctccagctctcttattcctcaagtatctcctgagactcgccaggtactcagccatgtgctgggccatgggaacccaaatattaataagacattgtcaggccaggcatgacactggctgaatgcctgtaatcccagcactttgggaggccaaggtgggcggatcacctgaggtcaagagatcgagaccatcctggccaacatggtgaaaccccgtctttactaaaaatacaaaaaatagctgggcatggtggcacacacctgtagtcccagctactcaggagccggagattgcagtgagctgagatcgcagagtgagccgaaatcacagatcacagagtgagcagagtgagactccgtctcaaaaacaacaacaaaaaacaaaaaaaccataagacattgtccatctgcggttcccagactattgcaggagaccaaaaagtaaagcgatttttttttttttttaatacggagtctcactctgttgcccaggctggagtgctgtggtgtgatctcaggtcactgcaacctccaactcgtgagttcaagcgattctcctgcctcagcctcccaagtagctggaattacaggtgcccaccaccacgcccggctaatttttgtattttcagtagagacggggtttcagcatgttggccaggctggtctcctgacctcaggtgatccactcaccttggcctcccaaagtgctgggattacagacaaagcgataattttaatatactgtaaaaattgctgtaataggcagcccacaagacactgagcgagagcagaggaaaccatcgatccagcctggacggtcaaggctttcttgaggaattgatgccatggggaaatggaagaaaaggcagagtgagtgggttgggtgcagagtcaggagaggttaggaagcctccaggagagcttcaagtgactgtgtgtggctgagaacagcatgggaatgcgtggaaggtatgcagacaaaattggagggatcaacaggggctggatatctaagctcacagaatagcaagctgaggaattggaactgcatcctgagggtgattgggaggttccgaactgaagatagggaaggcttccatcacagaactccctgggatatgccgggcgcggtggctcatgcctccaatcccagcactttgggaggccgagacaggtggatcatgaggtcaggagttcaagaccagccttcccaagatgctgaaaccccgtctctactaaaatacaaaaattagccaggtgtggtggcatgcacctataatcccagctactcgggaggctgaggcaggagaatcgcttgaacccgggcagcagaggttacagtgagccgagatcgcaccactgcactccagcctgggcgacagagcaagactccacctcaaaaaaataaaaaatagaactacgtgggatcaggtgcctcatgaaagccagagtcatgtgggcccagtggaagtatctaacctattatcagggaatctgtgaaggtgtttagtctggaaggaaatggagattttccaggacaggcaaggggaaagagactgaggaaagcgtatctgcagaggcctggagcggttagaagatgtgctgtgtccaggtgcctacagtctgtgtgcgtccgagcatgggctctacctggacacagtgaggagcgagattaaatacctggatcacagccgagtccaaagcctaggacttcatcctgggagcagtgcgtagggatggcggtcgtcccgccacagccttggctccgccatctttgaaatggccccatcacccaaaacgctcctccttctgaaccccagagctccactctgcacccatgctctagcctcacaccaaggactttcttggtaagagacggacagttcggtgaagtgattaaaagcctacaggcttagataatggaagagagagctccgtcctcacactcctttctgctgagcatgaaatgcctggttactcaccagttgtgaagacttcgtttgtgaatgagacggtcagttcagcggtggcttctgagaattctaagaaagcaaaacaatgttaggtcttccccgtggttccctatatcctctagatatctccattccccttttgagatatctaggctccctgaaacccctttctctgacacactgcacagacactgaagacagacaaattcgaaaggtgtaagacttatcttccatgaccggcttagtaagaagcagatccgttcagcaattgatagacacttggttttttttccacgttttgctgttatgaatattgctgctgtgaacattgacgtacaggtttttgtgtgaacataagttttctgttctcttgggtacacacccaggggtggtggaatcactgggtcatacagtaactctgtgttttactttttgaagaactaccagacttctttcttttttttcttttttttttttttttgagacagagtctcattctgttgcccaggctggagtgcagtggcgcgatctcagctcactgcaacctccacctcctgggttcaagcgattctcctccctcagcctcccgagtagctgggattacaggcacctgccatcacgcctggccaacttttttttttgtactttagtagaggcggggtttcaccatgttggccaggatggtctcgatctcctgacctcgtgatccaccctccttggcctctcaaagtgctgggattacaggctgcgcctggccacagactgtttttcaaagcagctgcaccattttatattcccaccagcaatataagaaggttcttccaaatcctcaccaatacttcttgtccgtttgttttgttttaaaaatcatagtcatcctagttggcatggtgaattttatggtatgtgaattatatctcagtttgaataataagatgtggatccatgtcttcgtgagcctagaggaagaatgagctcgtgttagcctcagaacacgggatctccaccttccaacttaggccattttctttttttctttttttttttttttttgagacagagtcttactctgtcgtccaggctggagtgcagtggtgcaatctcggctcactgcaagctctgcctcccgggttcacaccattatcctgcctcagcctcccgagtagctgggactacaggcacccgccaccacgcctggctaatttttttgtattttcagtagagatggggtttcaccgtgttagccaggatggtctcgatctcctgaccttgtgatccacccgcctcagcctcccaaagtgctgggaatacaggcgtgagccaccgcgcccggccaggccattttcttaaccaggggcctcctgaggccaccaaaatattcctgaactgcctcagctgataaatacgaagctcttgttgcagtgggtactatcctgggagtctttttatggtggaaccagcttggaaaaaactagtttatgctcagctctcggtggcataatgagagtgtgggtattatttggtctttgttatttctcttcgtgtgagatgcattaataaaccttttttttttttttcaattaaaatttcagttccagaatccatgtgcaggacgtgcaggtttgttacataggtaaacgtgtgccatggtggtttgctgcacccatcaacccatcacctaggtattaagccccacacgcatcagctatttatcctgatcctctccctcccccaattccccctacaggccccagtgtgtggtgttcccctccctgtgtccatgtgatctcattgttcagctgccacttacaagtgagaacatgcagtgtttggttttcagttcctgtgttagtttgctgaggataatgttttccagctccatccatgtccctgcaaaggacatgatctcattcctttttatggctgcatagtattccatggtgtatatgtactgtatttgctttatcctttctatcattgatgggcatttgggttgattccttgtctttgctattgtgaatagtgctgcaatgaacatatgtgtgcatgtatctttataatacaatgatttatattcctttgggtatataaccagtaatgggattgctgggtcaaatggtatttctggccaggcgcagtggctcacacatgtaatcccagcactttgggaggccgaggtgggcagatcacctgaggtcaggagctcaagaccaccctggccaacatggtgaaactcccgtctctagcaaaaatccaaaaattagccaggcgttgtggcatgcacctgcagtcccagctactcgggaggctgaggcaggagaatcacttgaaccctggaggcagaggctgcagtgagccgagatcatgcccctgcaatccagcctgggtgacagagtgagactctgtttaaaaaaaaaaaaaaaaaaaaaaggtggccctggtgcggtggctcacgcctgtaatcccagcactttgggaggccgaggcaggtggatcacctgaggtcagaagtttgagaccagcatgaccaacaaggtaaaaccccatctctactaaaagaaaaaaaaaaaaaaaagccaggcatggtggcaggcgcctgtagtcccagttacttaggaggctgagacaggataattgcttgaacctgggaggtggaggttgcagtgagccgagatcgcaccactgcactccagcatgggctattgagcaatactacatctcaaaaaaaaaaaaaaggaaaaaggatttctggttctgggtctttgaggaatcaccacactgtcttccacaatgaactaatttacattcccaacagtgtaaaagcattcctatttctccacagcctcgccagcacctgttgtttcttgacttttgttggttttttttttttttttttgagatggagtcttgctctgtcgcccaggctggagtgcagtggcacaatcttggctcactgcaacctccgcctcccgggttcacgccattctcctgcctcagcctcccgaatagctgggactacaggcgcccgccaccacgcccggctaattttttgtatttttaatagagacggggtttcaccgtgttagccaggatggtctcgatctcctgaccttgtgatctgcctgcctcggcctcccaaagtgctgggattaccggcgtgagccaccgtgcccggcgtttcttgactttttaataatcgccattttgactggtgtgagatggtgtctaaatgtggttttgatttgcatttctctaatgattggtgatgttgagcttttttttgtatgtttactggctgcataaacgtcttcttttgagaagtgactgttcatgtcctttacccactttttaatggttttttttttcttgtaaatttgtttaacttccttgtagattctggatattagacttttgtgaattgatagattgcaaacattttctcccattctgtaggttgtctgttcactctgatgatactttcttttgctgagcagaagctctttagtttagttagatcccatttgtcagtttttgcttttgttacaattgcttttgacgtttttgtcatgaaatctttgcccatgcctgtgtcctgaatggtattacctagattttcttctagggtttttatagttttcgggttttgcatccaagtctttcatccatcttgagttaatttttgtacaaggtgtaaggaacgggtccagtttctattttctgcatatggctagccaattctcccagcaccatttattaacccacagccaatttcatactaaatgggcatttcccttgaaaaccagcacaagacaaggatgccctctttcaccactcctattcaacatagtattggaagttctggccaggataatcaggcaagagaaagaaataaaggatactcaaataggaagagaggaaatcaaactatctctgtttgcagatgacatgatcctatatctagaaaaccccatcatctcagcccaaaagtttcttaagctgataagcaacttcagcaaagtctcaggatacaaaatcaatgtgcaaaaatcacaagcattcctatacaccaacaatagacaggcagagagccaaatcatgaaggaactcccattcacaattgctacaaagagaataaaatacctaggaatacagctaacaaggaaagtgaaggacatcttcaaggagaactacaattcactgctcaagaaaatcagagcggacacaaacaaatggaaaaacattccatgctcatggataggatgaatcaatatcgtgaaaatggccatactgcccaaagtaatttatagattcattgctattcccattgaactatcattgacattcctcacacaattagaaaaaactataaaattcatatggaaccaaaaaagggcccatatagccaagacaatactaagcaaaaagaacaaagctggaggcctcaggctcagacttcagactatattacaaggtgatagtaaccaaaacagcatggtactggtacaaaaacagacacatagaccaatggaacagaatagagatctcagaaataagaccacacatctacaaccatctgatcttcaacaaacctgacaaaaacaagcaatggggaaaggattccctatttaatacaccttgttttgattttgatttcaacacagcgtgtggtatttgcatgccatgtgatacagtttgaatatgtgttcccaccaaatctcatactggattatgatccccaatgttggaggtgggggcctggtgggaggtgtttggatcataggggtggatccctcattgcttggtgctttccttgcaatagtaagtgaattctcacaagatctggctattgcaaagtgtggcatgtcccccagtcccaactctctctctctcttgctcctgctcccaccacatgagacagctaccccctctttgccttctgccatgactgtaagcttcctgaggcctccccaaaagcagaagccagccttctgcttcctatacggccttcagaaccatgaaccaattaaacctcttttcttatcaatgatccagtctcagatatttatagcagcacaaaatcggcctaatatagcatgaaatattgctcagcaatcaaaaggaacacatcattgatacatacagcagcttggatgggcctcaggggcattgcactgagtgacaaaaggatatctcaaacggttgcatactggatgatcccatttacatcagattctagaaatggaagattatagagatggagaacaaattaatggataccaggagttagggatggcaagggaaggagaagggtgtaggtgtgaatataaaagggtagcccaagggaggcccttgtgagacggaagagttctgtacagtgactgcggtgatggtgacgcgaatctacaactgtgacaaattggcatagaactagacacctactttatgccaatgtcaaattcctggtttttatgttgtactctaattacgtaagatgtaaccattagaggaaactggaaaaagagcacatgggattcttctgttctatcattgtagacttcctgtgactctagaaccatttcaaaagagaaagttcaaaaattcagtcagaagcacacgcacacatatgcacgcatgcacacacacacatatgcacgcatgcacacacatatgcacgcacacacacatatgcacgcacacacgcacatgcacgcacacacacatatgcacgcacacagtatgtgaccatcttccatgtccctgcccactaggcataatagccctcactctgccctcaaccccgcaaatctcatccttatcaacctcggctctttccagcatgtttctcctgccttggtgcttcactctgagacacagggaatgttagacacgcccagcctccagcctagcgtatgatattcttaaagtgcaggccgtagtctggtacaccgtattcagctgagatgtttgtgaaagtggaggggataacacgcctcacacaaaacttaccgcagtggttctcaaagcagcattctggagccatagcatcagcatcacctgggaacttactaggaatgaaaatgactggattcaccccagacctactgaagcagaagccctgggggctcagaaatctattctttaagcctccaggtgattcttatgctcatggaagtttgagaaccgctgatcaatgcattcagtgactcagaaacagagtcccggactctacaggtttgttggttggttggttggttggttggttggttagtttgtttgtttttgtcacccatattcaaccagctggactccacagtatagcaagccactccgattattcttctgcatgttatatgtgataaaccatccacctagagtaggattgggggcagcatcttaacatctaactacttaggacacccaccctgtttacaggcagaaataaaggatttttaaaacaaagcaaatctgtgaaagaaccaactgaattaaatcgagaagtctaggcagagaggagagagagaaggggtccgtgtacctcatacgctgtgcaccagaatggaccctgcagaacctacctgctaccggggaaggtggttctgttggtaaccggctgggggtcacagaggttcctgggaaatcagaaaatgagataaatctgtgctctgtcgctgtgggtcctgaacaaataacgaaacatctccgtgactgagtttcctcaccggaaaaatgagcctaaagtagcttacatcactggactgttgtggatgttaataagcatttgagctgggtgcagtgcctcatgcctgtaatcccagcactttgggaggctgaggagggcagatcacttgaggtcaggagttcaagcccagcctggccagtatggtgaaaccccgtctccactaaaaatacaaaaattagccaggcgtggtggtgtgcacctgtaatcccagctgctcgggaggctgaggcaggagaatcacttgaacctaggaggcagaggttgcagtgatctgagatcgcaccactgcactccagcctgggtgacgcagtaagactccatctgaaaaaaaaaggcttagccaggcgtggtggctcacacctgtaatcccagcactttgagaggccgaggcaggcagatcacctgaggtcaagagttcaagaccagcctggccaacatggtgaaaccctgtctctacgaaaaatacaaaaattagctgggcatgatggcaggtgcctgtaatcccatctactcaggaggctgaggcaggagaatcgcttaaacccaggaggtggaggttgcagtgaactgagatcactccactgcactccagcctgggtgacaaagtgagactccccccaaaaaaaaaaaaaaaaaaaaaagcagcagcatttgtaaagcacacctggcacattctgggctattaacaaggaaatgcatgcagctcccgtccacctttttcaacctcagttctatttcttctggattcctgtgtcctacccctcactgtgaccctgggggcaaaacagatttttctaccaaaaactaaatgatgtattttgtttgatttaatatgacattgttaaatgtactgatcagtggcgttgggtatgttcacattgtggtacaatatgttgacctctagaacttatttttcttgcaaaactgaaattctgtgcccattaaacactaattccttctctctcctctttctggcccttaacaaccaccattgtactttgtgtttctacagtgttgacattagatacctcctttgactagaatcatacagtagttgtccttttgtgactgacttagcataatgtcctcaaggtatatccatgttgtagtatgtgtcagaatttccttcttttttaaggctgcataatattccattgcatgtatataaccacattatgaggtatgctgctcttttttgaaagaaaccccctttaagaatggtagtcaagtccgacgcggtggctcacgcctgtaatcccagcactttgggaggccgaggcgggcagatcatgaggtcagttcaagaccagcctgaccaacatagtgaaaccccgtctctactaaaaatacaaaaattggccgggcatggtggcaggcacctgtaattccagctactcgagaggctgaggcagcagaatcgcttgaacccggaaggcggaggttgcagtgagctgagatcgcgccactgcactccagcctgggtgacagagtgagacttcgtcaaaaaaaaaaaaaagaaacctccattctcccagctgcctgtagcccagggcttcctgccctcccacttccttcccacctctggccccgcccctgcagcccagggcttcctgccctcccacttccttcccacctacggccccgcccctgcagcccagggcttcctgccctcccacttccttcccacctacggccccgcccctgcagcccagggcttcctgccctcccacttccttcccacctacggccccgcccctgcagcccagggcttcctgccctcccacttccttcccacctacggccccgcccctgcagcccagggcttcctgccctcccacttccttcccacctacggccccgcccctgcagcccagggcttcctgccctcccacttccttcccacctctggcgccgcccctgcagcccagggcttcctgccctcccacttctttcccacctatggccgcgcccctacagcccagggcttcctgccctcccacttccttcccacctacggccccgcccctgcagcccagggcttcctgccctcccacttccttcccacctacggccccgcccctgcagcccagggcttcctgccctcccacttccttcccacttatggcccctcccttggaatggccatcaggacctataaaggctgaggaagaaaggtttggtctgcactacccctacctgtgaccacaagctccagggggtcgctgggggctgaccacaggtatgggtccctgctggagaagctgtagcatcggtaggttccgctgtgggcggcggtcaccgtgatgatgggaaaactagccctgtaccatctctcgggattcttgtagggcgcagggtccccttccttgtacagagcaaattggtcaaagccataccgagtctgacactgtagggttacgtcccctcctgacgacaccgccgggccgggctgggctgagagcgagggtttggcaaaaactcctgggagaaaaagaaagtctgatgttgaaggcaggagccagcatctcagctgagactggggaggtccccacacctgcctaagagctggggagctttttggctgtatccctcccagagagcgcactcccccacccaagctcacagagaggtcgagtcacccagtggttgaggaaggaggctgtgctcacgtcctagtgcttgggtgcaaatcctagttctgccttcaggggcctggtggccctggagacaaatctccctctgtatctgagcctcactgccttgttctgttaaaatggggatgactgaatgagacagtacacagtaatttgcagagtgcctgttgcctagcaagcgctggagtaagtaaatagcttaagcttatactgtgctgtaagcttgtattgccacatacaattgttacgttgtaaatgtggctgacagtgctagcttccgggtgccttccaaacttatgatgtatatcagttcagtgaatcctcagagacctatggagtcctcactcttaatgtccctattttataaatgaaactaaggcacatggcattaaataatttgtccaactctaggtaacaatactgcagtgtacagctgaaatttgctaagagggtagattataagtattctcacacacaaaaaagttaactgtgtcaggtgatgtatgttaattagcttgctagtagtaactgtctcacagtggattcgtatatcaaaacatcaacttgtacaccttggatatattccatttttgtttttcaattatacctcaacaaagctggacatattttaatttaaaaataaataaaaaacttgtccaagatcataagtggcagagttgaaatctgcactcacagagtttgattccagggtctccgctcctaaacacgaacctacactactctgatgtgaggttgttgtcatagaccggtgtggtgatgcatgcctgcacacaggagtcagaaaaacaaaggttgaggctgggtgcggcggctcacaccggtcatcccagcactttgggaggccaaggtgggaggatcgcttgagcccaggaaggcgaggctgcagtgagctatgatcactgtacactagcctgggtgacagagtgagaccttgtctcaaaaaaagacagagagagaaagcaaaagaaaggaagtaaggaagataaaaatataagctgcctaataattatggcattcactcaacaagaagaaaaagaaagaaagaggaaggaagggagggagggaggaaggaaggaaggaaatatataagctgcctgataactgtaacattcactcagcaatattttctcttaattttcacttaagcaactattatgtgtctgtctgtattctttttttgttgtttcatttgttttgttttgttttgttttgttttgagacggagtctcgctctgtcacccaggctggagtgcaatggcatatatatatatatatatatatatatatatatatatatatatatatatatatatatatattttttttttttttttttttttttttttttttgggaaacagaatctcactctgttgcccaggctggagtgcagtggcatgatcccagctcactgcaacctccacctcctgggttcaagcgattctcctgcctcagcctcccgagtagctgggactacaggcatgcaccaccatgcccagttaattttgtatgtttagtagagacagggtttcaccatgttagccaggctgatctcgaactcctgacctcaggtgatccgtccacctcggcctcccaaagtgctggcattacaggcgtgagccaccgtgcccgaccaggaattaaaaatagacaaccaccaccaagataaaaaaaggtatacttcacataccagatagtgaggagggccactttgactagggtggtgggggatatacttagcgagaagagagtatttgagtctgaccctgaaagaagtaatgaggcagccaggctggtccattctagtagcagagaggaggccagtgatgctgtggaggggagtgaggcagggaagaggggagggaggcaggatttataacgcggaatagaccacagtgcagctggccaggaattagggtggcgtgagtgaggcactctcctgggatgtaaaatttaattattcccaaacaattaacatatttgaaaaaattattgaaaatttgaagagtaggtcgttaaaactcacattattctgtttgaatactttattcccctgaaagatttattagaattttacattctaggcttttgtggatgcaagcgcatcagtgctatttccaaaacctacttctagaaaataaccatttaaaagtgcactaactgggtgcacctatagtcccagctactagggaggaccacttgagcccagggatttgaggctaaagtgagctatgatcatgcctgtgaatacagcgagtgtactaaagcctgggcaacatagtaagacctcttctctttttttttttttcccaagacggagtcttgctctgtcgcccaggctggactgcagtggtgcaatctcggctcaccgcctcccaggtttaagcgattctcctgcctcagcctccggagtagctgggattacaggagtgcgccaccgcgcccagctaattattattattttttttagtagagacggggtttcaccatgttggccaggctggtctcaaactcctgaccttaagtgatccacccacctcagcctcccaaagtactgggattacaggcgtgagccgccgcgcccggcccaacctcttctcttaaaaaaaataaataaataagaaaagaaattagaatatttgcaccaatcaagagtctaaggagacataaatactaaatgcactgtggggccctggacggggtctgggaacagaaataggatattagtggaaagactggtgaaattcaaatagcctggagtttacttgatataatatagttgtgtctatggttagttttttgtttgttttttgatacagggtctcactctgtcacccaggctggagtgcagtggcgtgatcacagctccctgcagcctcggcctccctggctcaagcgatcctcctgcctcagcctcctgagtagctgggactataggtgtatgccaccatgccccactaatttttaattttgtttaaagatgaggtctcactatgttgcccaggctggtcttgaactcctgagctcaagcaatcctcccgcctcagcctcccaaagtgctgggattacaggtgtaaaccactgggaccagtgctacgtttattttttggttgtaacaaatgtaagatgttaacatgaggggatcctgggtgaaatatttccattaatattatctttggaacttttctgtcagtctaaaaattactccaaaacaaagttttaaaaagaatcccgagccaagcacggtggcccgtgaccgtagtccctgctactcatgaggctgaggcaggaggattgctcaaggcaaggagctccaggctgcagtgagctatgactgctcctatgaacagccactgcactccggcctgggcagtgtagcaagaccccatcgctaatttttttaagtgcattaaaacacagataaagggttgcctgtttttcgttttggcacagactctggtatgacttgacacaggcactggctgattctgcctttatttgaaattctggtttttttcattgtggatgtttttgcaatttattttgatttttttaaaaattgcatgaaaatgttattcacagccagatgcagtggctcacgcctgaaatcccaacactttgggaagccaaggtggaaggatagcttgagcccacaggagttcgagaccagcctgagcaacatagcgagaccctatctctctctcttttgtattttaatgccttttgtgaaaactgtcaagagaccccatctctataaaaacataaaaaatgagctgggcgtggtggtgcacacctgtaatcctagctacttggagggctgaggcgggagaatcgcttgagccctggaggtggaggctgcagtgagccaagatcgcgccactgctctccaccctgggtgacgcagcaagaccctgtgtccaaaaaacaaaatattattcacattgatccataaatgtcgtggcaccaccacccgctaggccagtgcctcgtttgcctcaccctaatccctgccctcaatgtcccccgtatttgtgtcctgaacggaggaccacgcagtcccaggctccgatcccccttcctttacccgtggcaacgagctccagctggtcgctgggcagggaccagaggcttccgttctggtaggagcagcggtagcgtccagccagacttctcttcatggccgggatgaagaggactgcctgatcctggtacctgctggaactcagcttctccaggcggtacaggtccacgcccggaggtccctggcaccggagggtcactggcttctccaggggcaccagggagctgggcagagcctggagggagggcttggggagcggtcctggaagaggagcagggctgggtcagcctccccgcagaccccgcctggaccccgctgctcccgcgctggcggatcccgcaggagggaaggggtctggggaaggactcaccactctgcgctggcacacgccccagacacagccctgaggaaagaagaaagggaccagatgccaggactcgcttttatggacattcctgcctgctgggcgcggtgataagacatttgcatgcatatgctttactctgtcctaataatttcttcaaaagacacacaggaatgtaatttaagtgagagaaaccggtcagaaaaagccacatagtttatgaggtcatttacatgaaatatccagaataggtaaatctataggagatggagaagaaagcagatccatggctgggggtggtgggagaggagggcaaggcatggtggcgtactgctctctgtggacttgttcgtgttagacacggtgggctcgttcgtgttagacacggtggactcgttcgtgttagacacggtgggctcgttcgtgttagacacggtgggctcgttcgtgttagacacggtggactcgttcgtgttgtgttagacacggtggactcgttcgtgttagacgcggtggactcgttcgtgttagacacggtggactcgttcgtgttgtgttagacacggtggactcgttcgtgttgtgttagacacggtggactcgttcgtgttagacacggtgggttcgttcgtgttagacacggtgggttcgttcgtgttagacgcggtgggttcgttcgtgttagacgcggtggactccttcgtgttgtgttagacacggtggactcgttcgtgttagacacggtggactcgttcgtgttagacacggtggactcgttcgtgttagacacggtggactcgttcgtgttgtgttagacacggtggactcgttcgtgttgtgttagacacggtgggctcgttcgtgttgtgttagacacggtggactcgttcgtgttgtgttagacacggtgggctcgttcgtgttagacgcggtgggctcgttcgtgttagacgcggtgggctcgttcgtgttgtgttagacacggtgggctcgttcgtgttgtgttagacacggtgggctcgtttgtgttgtgttagacacggtgggctcgttcgtgttagacattgcccattgacttcctcagtggatgtgaggaatgggacctgagacattgctgtcccttcgtttcctcccttcagtctcccaatattaaataatatccaagtacattacaatagtatgcaattgtatagacaagtattgtaaatactattgcatattgtatattattgtattttattgtctatgtaatatatgcgataaaaccccacactaatgggatgcattgggctccaaggatggagcaggatggagcctcagcgtgtaagtcaggacgtctcagcatgtgctggccatgggtttcccggtatttacaacatttgcttgaatcagtattccatgattacatgataggatataatatatataataatcgtttcaaatagcctgaaggaggatggggaaagttcccaacacagaaaggatgcatgtttgagaagatgggtgtgctacttaccctgatctgattactatatgtatatacacatatagtgcatatatgtaaacctacatctatacatacatgtgtatgtacatatacacgtgtgtacatacacacgtgtatatgtatgtatatgtatatatgtatgcatgtgtgtgtgtgtgtgtgtgtgtgtgtatacatatgtatacaaatacatgtacataagcgatcccctcctggaattgcttgagcccaggaggtcaagtctgctgtgaggtaagattgcaccactggccgggcacggtggctcatgcctataatcccagcactttgggaggccagggtgggcggatcacaaggtcaggagttcaagaccagcctggtcaacatggtgaaacaccatctctactaaaaataccagaaattagctgggcatggtggcacgtgcctgtaatcctagctactggggaggctgagtcaggagaatcacttgaacccgggaggcggaggttgcagtgagccaagatcacgccactacactccagcctgggcaacagagcaagactccatctcgaggaaaaaaaaaaatgatattgccccattgcactccagactgacaacagagcaagaccctgtctcagaaaacgaagaggaggaggaaaaaaaaagtactaattatctgaaattccaatttaaccaggcatccagtgttttatctggtaaccctcattcttacacacacacacacacacacacacacacaaaggcgggatagttgtcattcccactgtaaacataaggaaactgggcagaggccaagcaaccttgtgtagctcacatagcaagaagtgggtgaacccagctcatgtcttgactctgagctcagagagtgacaacttgtcaccagcgcccccatagccaccaccctttgtccaccccaggctccctctgcaccccaacgcaagctccggccgcttctctgtccccctcctcctgccgcatcacagcccacctcagcctctttgtaggtttccatgcgacgctgtaccatggctgggagtcttccaggcgccgtgctgagcgccttctgtgcatggactccaagtcgccataatcgtacgggttacccaccattatcagtcccctcttatacatcaggctagtgagacagtatcttatccacagtcctacagctggcaggagtagattcaaaccctagcagcaccaattagtggtaaagagtgtggacttgggaacttacaggagtagagagcacagtggtggttaccggggcggtggggtaaggtttggggagatgttggtcagaggaggacagtttcagttggacaagaggagtatgtcttggagatctactgcacatcatggtgactgtagttaataacaacatattgtacacttgcatatcaccgatagtagattttaaatgttctcaccggccgggcgcgctggctcacacctgtaatcccattttgggaggccaaggtgggcggatcacctgaagtcaggagttcgagagcagcctgaccaacatggtgaaaccctgtctctactaaaaatacaaaaattagcggggcgtagtggcaggagcctgtaatcccagctacttgggaggctgaggcaggagaatcgcttgaacctgggaggtggaggttgcagtgagccaacgtcatgccactgcgctccagtctgggcaacagagtgagactccatgtcaaaaaataaaaataaataaaaataaatgagcgtggaatactactcagccattaaaaggagtgaaataatgtcttttggccaggcacagtggctcacatctgtaatgccagcactctgggaggccgaggtgggtggatcacgaggtcaagagatcaagaccatcctgcccaacatggtgaaaccccatctctactaaaaatacaaaaattagccgggcatggtggcgggtgcctgtagtcccagctactcgggaggctgaggcaggagaatcacttaaacccgggaggtggagtttgcagtaagccgagatcacaccactgcactccagccttggtgagagagcgagattccgtctttaaaaaaaaaaaaaaaaagtcttttgcagcaacttggatggagctggaaggcattattctaagtaaagtaatacaggagtggaaaacaaaaatctgtatattctcacttataagtgagagctaagctgtgggtatgcaaaggcatgcagagtgatgtaatggacttcagagactcagaagggaagggcagaagtggggcagggatgaaaaactacacattaggtacaaggtacactagtcaggtgacaggtgcactaaaatctcagaattcaccagaatataattcatccatgtaaccaagaaccacttgtatcccaaaagctactgaagcaacaagccagatgcagtaacctgtacaggccacacctgtaaccccaacactttgggaggccgaggtgggtggatcgcttgagcccaggagttcaagaccagcctgggcaacatagcggacccccgtaactaaaaaaattacaaaaacaagccaggcatgatggtgtacaactgtagttccagatactcaggaggctgatggggaggcactggttgagcctgggaggttgaggctgcagtgagccatgatcatgccactgccctcctgcctgggtgacagaagtgaggccctatctcaaataaaattaaataaataaaagttaaaacaggctgggtgcggtggctcacgcctgtaatcccagcactttgggaggccgaggcgggtggaacctgaagtaaggagcttgagaccagcctggccaacatggtgaaaccccgcccctactaaaaatacaataattagccagacctggtggcagatgcctgtaatcccaactattcgggaggctgaggcaggagaatcacttggacccgggaggcagagtttgcagtgagctgagatcatgccattgcattccagcctgagcgaccgactgagcgagactccatctcaaaaaacaaacaaaaagaaaaaaagaatacatccatggatggataatgaatgagaggttgtttatattcacagttaaccctctcatctccagtaatgcaaccatcttcttcctgcttagccttttggagatgctgtccctttagtggtcaaattctgaagaaatcaggaaataatgcattcgacatgcccagcacaagtgaagatcaggcagcagaaatgcattcgacctgccacccatccatcaggagactatttactccactactgtaggggatactgacaaattaaatccatacctagtccagatatcaattccacaatttttttttttttttttttgagacggagtttcgctcttgttgcccaggccagagtgcaatggtgtgatcttggctcaccgcaacctccacctcccaggttcaagcgattctcctgccttagcctccagagtagctgggattacaggcatgtgccaccacacccggctaattttgtatttttagtagagatggggtttctccatgttggtcaggctggtctcaaactcccgacctcagatggcccacccgcctcggcctcccaaagtgtgtaagccatggcactcagcctttttttttttttttttttttttttttgagatggaggctctctctgttgcccaggctggagtgcaatgcctgacctcagctcactgcaacttctgcctcccagtttcaagcaattctcccacctcagcctcccacgtagctgggattacaagcacccgccatcacgcccggctaatttttgtagagatggggtttcaccatgttgaccaggctggtcttgaactcctgacctcaggtgatccacccacctcggcctcccaaggttgagattacaggcgtgagccactgtgcctggcccacattttttaaaaaaggggcaactgcagtgtagtagaacaaagttgtgaccaatgctaggatactctgttcatttcctgacccagccatgaatacactggaataactcatgcaaaatgccagctcgctggccccccgtttccccacccaacaaatgaaggggctcttacaggttcctttttgtcctgaaattcatcaccaatgcaaatttcttaaaaatcctttgtctggcagtccatgcctgtccttcagcatttcccagatctgaccctcaggactcaccaagacagaagagggcggtcggggatggagacatggttcctcagccctgtcctgagctctgtggccagggagggaagtggtgggagcctggggcacaggctcaggatgtgatgaggatgaagaatgctctcctcccttcctccaccagccccggcctttcctaattgagactcatcgagccgtagccggctcctcagtacagtgacttgcacacaagctccaaggagccgcgcttatctcctctggccagcctggcgttgcaccgtttgtccgcctgctggggcctggtctgtgttcccgtgctcccataaactccctgatgtcactaggaaaatacgcatcaaaaccacagtgagatatgacttcacaccttctggaatggctgtattttttttttttcttttgagacaaagtctcgttctttttgcccaggttggagtgcagtggcgccatctcggcccactacaacctccacctcccaggttcaagcgattctcctgcctcagcctcccaagtggctgggattataggtatgtaccacaccaggctaatttttgtatttttagtagagatggggtttcactgtgttggccaggctggtcttgaactcctgacctcagttgatccacctgcctcggtctcccaaagtgctgggattacaggcatgagccactgcacccgaccggctataattttttttaatggaaaacagcagatattggtgagtatgcagagaaattgaactgcgcgtgcattgctggcagggacgtaacatggcgcccctgctgtggaaaacagttccagcagctcctccagaagttaaacgtgggattgccataaaatccagcaattccacttcggggtacacacctaaaagaactgaaaacagggtctctaacatatttgtacacagtgttcatagcagctttattcacaatagccaaaaggtgaaaccacccacatgtccatcaacaacaatggataaacaacatgtggtatatacacacaaggtaatatcaaccagccttaactaaaagaataaaaatcagccaggcacagtggctcacgcctgtaatcccagcactttgggaggccgaggcgggcggatcacctgaggtcaggagtccgagaccagcctggttaacatggtgaaaccccatctctactaaaaatacaaaaattagctgggcgttaaattagccgggcatggtggcaggtgcctgtaatcccagctacttgggagacggaggcatgagaatcgcttgaacctgggaggcagagattgcggtaagccgagatcgcaccactgcactccagcctgggcggcagagtgagactgtctcaaaaataaaaataaggccgggcgtggtggcccatgcctgtaatcctagtactttaggaggctgaggcaggcagattgcctgagctcagcagttcaagaccagcctgggcaacacagtaaaacccccaaaaaatacaaaaaaaaaatagccgggcatggcggcaggcacctgtagtcccagctactccggaggctgagacaggagaatggcttgaacccgggacgcggaagttgcggtgagccgagatcgcgccattgcactccagcctgggtgacagagcgagattctgtctccaaaaaataaaaaatattataaaagaataaattcagatacatgctacaacgtgatggaccttgaagacattatgctaaaggaaatattccggacttgacagataaatactgcattgtgccgcttatctgaggtatcgagaggagtcaaattcatagagacagggattagaatggtggttgccaaggcctgggaaaagtggggagttactatttaatagggagcgcttaggttgaagatgatgacaaagtctgggggatccatagtggtgatggttacacaacactgtaaatgtatttatatttaatgccattgactgttttttgttttttggttttttgagacggagtctcactctgtcgccgaggctggagtgcagtggcgcgatcttggctcaccgcaacctccgcctcccaggttcaagcgattctcctgcctcagcctcctgagtagctgggactacaggtgcgtgccaccatgcctagttgattttttgtatttttagtagagacggggtttcaccgtgttagccaggatggtctcgatctcctgaccttgtgatttggcctcccaaagtgctgggaatacaggcatgagccaccgcgcccggccagtgccgttgacttgtatgtgcacttacaggtggttaaaatgagaactatcagggtgttgatatctaaaaacctccctgccatcatcttccctacatctctcattcagtgaccatggttgaatgcctgccacctttcaaatattatgtcaggcactcagtattggcagttttatccattataaatgctttaagctgcatagaattttaaacgtgttaataaaagtagttataaatctttaatacataagctggctttaaaattattggtaaaataagattagaaatgtcttaagaattgttggcgtttttgtttgcacttattgaacgagtggtttcatgcttatccctgcagaatactatgagatttgtcataagggttataaaactataaacccggctgggcgtggtggctcacgcctgtaatcccaacactctgggaggccgaggcaggcagatcacctgaggtcgggagtttgagaccagcctgaccaacatggagaaacgccatctctactaaaaatacaaaattagctgggtgtggtggcgcatgcctgtaatcccagatactcaggaggctgaggcaggagaatcgcttgaacccgggaggcagaagttgcagtgagccgagattgcgccactgcactccagcctgggcaacaagagtgaaactccatctaaaataaataaaaataaaacatttgttttttgtagagttggggtttcactatgttgcccaggctggtcttgaactcctcctgggctcaagcaatccaccgacctcagcctcccaaagtgctgggattacaagtgtgagccactgtgcctggccctattgggtccttttaaaagatacataaaaaatcaaatgcaacagtgaagtcaatcacccgatggcagaaattggggtgctcctggcatgtggtcggtcgaagccaaggacactgctcagcattctgcagtgcacaggacggccccgcccaggcggagaatgatccggtgacacatataggtgggaaggatgcacgaatgatggcgtttaggaagaatattatcacttctttcccgtaagagcaacttagagcaagaaaatggtattattcttagggccttctctcttatggaggctccaagccagggttgccatggcagaagatgctgggcttgctttttccttgagagaactgtactcaagatgatgtaactgtcaccccgggtgccacttgggtgctttggagaagcgctcagacgcgacacgccgtgacgactccgcggcaggcagccggacctgtcctctggcgtgcggttcacgggctgtgtttatccccctggttccttcacagccaccttgggaaatacgttgcctctgaatcacgccaggcaggctctcactgtgtgtgctgcggggctggaaatcagggtgacactccgctaccgaacagcctgactaggaagccagaaagacgctgccggctttagtttgtcctttgactttccttgatatgaatgaagatagagcacttccacactgcacaacaggaaaagcccagaacgcttcctggagatagcgagggggtgatgcagcggacagctatggctgatgaccccctcacctctgactccccctccctccctgctttctgaacgcacatccatcaccaaccataggttcctgtttggggtttgctggctggaaaaaaaaaaaaaaaaaaaaggaaagctggctttctagtaaaaaccacttcctttgctcatttatcaaactcaaacgctaggagggccacctaacatcctccgtcccacgcaatggggtgtttctggagcactccggtttatcagggaccctgtcagttgccatcgcacatgtatatggggccagcccctgtgccaccgaagaggggggatattgaaaacatgttacagccaggagcggtgcccccttggttcaagcagttcttctgcctcagcctccctaatagctgggattacaggcgtgcaccatcacgcctggccactgttatgtagtttttaccacaatttaaaaaaggaaagagtgcctgggtgagtcctacgcacctattcggagaaccaaaggctttgaggttatcctcggcccacccatctgatgggagtgtttctcaaacttgcttttccgtgatctcccagtaagaaatacctactacacacacacagtctccggtcggcatgcttagggtagtcttccaattccccctcctggtatttacaccctggagtggtccgctcctcttgggctgaacctgtaacttgctcccaagcaagagcacacagcaagctcacgcacgtggttgttggtgtgattctgtttctccagattgtctccattcctccctggcttctccacagggccgctcaccatggcagccggctccatcaccaccagccagcgagagggcaagacaagagggctgacgagggacgctaccatcacagaggtcagttttgtaacctaaccacaagactaacctactgtcacttctgccctatcctactgctagaagccagtcgctacatctcccccacactcaaagggaggtggtcgcaccgtggggtccactggaagttgcctaccagactcaggtcatcccaaacacaccctctagccatttggtgtggcatcggaaagaaaactaaggccaggtacggtggctcatgcctgtaatcccaacaatttgggaggccatggcggaagggtcacttgagcccaggagtttgagaccagcctgggcaacatagcaaatgttatgttgccacctctacaaataattagccaagtgtggtggcatgcacctgtagtcccagatactcaggaggctgaggcaggagaatcacaggtcgaggttgtagtgagctgtgacggcactgcactccagccttggcaacacagtaagacctcgtctctaaaaaagcaaaaagggctgggtgcactggctcacacctataatcccagcactttgggaggccaagacgggtggatcacctgaggtcaggagttcaagataagcctggccaacatggtgataccgtctttaattagccaggtgtggtggtgggcgcctgtaatcccagctactcgggaggctgaggcatgagaatcgcttgaacatgggagacacaggttgcagtgagctgagatcatgccattgcactccagcctgggcaacagagcgagactaggtggctgttctgtgtactgtgggatattgagtagcatccctggcctccccagtatctcaaatatgaaaacatgttttctatctcgattactgagcttttcggtgcctccttcggttctgcacctaagctaagagccccttcatctcaccctgatctctatccagtttctaacacagcagtcttgtaagatgcccggacttaaacggttatttcctgtgaaacaggtgaaaggggctttcatctctaaaaagtcggaacttttttttttttttgagacggaatcttgctctgtcacccaggctggagggcagtggcatgatctcggctcactgcaatctccgcctcccagcttcacaccattctcctgcctcagcctcccgagtagctgggactacaggcgcccaccaccatgcccagctaattttttgtatttttttagtagaaacagggtttcattgtgttagccaggatggtctcgatctcctgacctcgtgatccaccgcgcccggccaagtctgaacttttgcatggcctgttgccctggtgataaactgatgccttgtttcctaaaaggaataaagccatgagttgcctttgttcagctcatgggcattcacccatgcacagaggaaaaataaaatctacgactcgggtacattttcttcttttttttttcttttaaatgagcaagtttgagagtctgcagtttggactaccatgagaattgataggaaggtgggagtcccaggcaatcccaggtcctgtagcagcagctggtggggttcccactccatgccgtgcagagcctgaactcaggatgacacctgcacctgctctctggctgggctctggcacaggaagccctcagcaaacacccccggcacagccatgccatagccagacaacagctcgctgtaccacaccatcatgggagacagcagttattctgagcatctcactgctgaagaaaccaaggctcagagaggaccatgcatgcacaaggtcccacagggacccaagaatccaccaagtgtcagacaacttgcccatgctcttcacggagcaccttggaaccctccccgacaggcaccgctggctctcctgacgtggcctgcaagtgcacggagccccttcctcctcggccattcccagtttagattcccaggggaagcatcagatggcccctctcccctgctggcagcagagcagacggaaccagccagagcccagggcagtgctcacctgcaggccagtccactgcggccagcaccgccccctagaacctactgcgggcatggcggccgccagtcctgggtctcccggctcaggtagtgccaggaagctgcgggcatggcggacagctgtcctcggtctggaggcgccatcctggctttcaaatctgctccagaggttatctggggaggggctgctccctcacagagggagcctctaagcccaccaggcgggcactttcagcccaaagcctccgggccacctcctcatcctcagcctcgggggccggggccttctgtttgagtccatcgaagtactttccggaaacatccgccagttcctccgccacggccaggtatgtgctgggctgggcggccagctcggggctcttgaccagcagccagaagatgggccctgcaatcagcccacagggcatttagtccacactcgctcagagagaaggaaggaagccccgctccccggtcagggagctccgggtccctggagtcccacagagccctcctctagccctttccccttggctgcctccatctgcagttcccttccctggcactgcccaggcaaatcccaccagaccagggatcagaccaaaagctgcctcccccaaggagccttcctggctttgtccaggaaaatggaagctctcttcctcttggtcagccccagtcctcaccctaccccatttctcctttaataacatcttattaaatgcacctggcaccagcctcaggttaaggatctttttttggccaggcgaggtggctcaggcctgtaatcccagcactttgggaggccgaggcgggcggattacctggggtcgggagttccagaccagcctggccaacatggtgaaaccccatttctactaaaaatacaaaaattaactgggtgtggtggcgggtgcctgtaatcccagctgctcgggaggctggggcaggagaatcccttgaacctgggaggcggaggttgcagtgagctaagatcacaccattgcactccagcctgggtgacaatagcaagacttcgtctcaaaaaaaaaaaaaaaaaagggctgggcgtggtgactcacgcctgtaatcccagcactttgggaggctgaggcaggtggatcacctgaggtcaggagttcaagaccagcctggccaacgtgtgaaaccctgtctcaactaaaaataaaaacttagctgggtgtggtggtgggcgcctgcaatctcagctactttgggaggctgagacaggagaatcacttgaaccgaggaggcagaggttggagtgagccaagattgtgccactgcactccagcctgggtgacgagcaaaactccgtctcaaaaaaaaaaagacatttatttatttatttattgagacctggtgtcttgctctgtcacccaggctggagtgcagtggtgtgatctcagctcactgcaacctctgcctcccgggttcaagcgattctcctgcctcagcctcctgagtagctgggactacaggtgcacaccaccacacctggctaatttttgtatttttagtagagacggggtttcaccatggtggccaggctggtctcgaactcctgacctgaggtaatccgcccaccacagcctcccaaagtgctgggattacaggcgtggctattagcctcgccaagttaagattcttgatgccaaccaatcacccactccatgtttttcaggattataaacactagtcataaagcatgaactgcctgggggtggtggctcacacctgtaatcccagcactttgggaggcagttggatcacctgaggtcaggagtttgagactagcctgaccaatatggtgaaaccccacctctagctgggtgtggtggtgtgcacctgtaatcccagctacttggagacaggagaatcgcttgaacctgggaggtggaagttgcagtgagtggagatcatgccattgtactccagcctgggcgacagagcaagacttcatctcaaaaataagtaagtaaagctccaactgtttgttccacctattctctgggcggggtcctgtgctggccctttcaaggaaggtctcgtataacccccccagtgactgtgaggtgagtcctattaaggcctgcactctgcagatgaagaaacaggctcagaggggtaacagctcttccccaggaggtgcagctggtttggggtgaagctggagttaccctgagtacagcctgactccaggcgtcagctccacggcctcttcctctgagacacggttttctcatccgccagcagggctctgcctgcttcccggggctgttagaggctggcaggccaggtcaacggaggaaagggacctgtgctctgtgcctcagaagacgtaggcgaggagcaggcatgaggcctcagggacggtctctgagggagggtcctgggccctgggctgagaaagcaggggtggagggctccacgtggagaccccaggctgggaggggactcaccgagtgtggtgctggagaaggtggagccatggatgcccgtgtgtctgcccagctctgtcctggccacgccggggtgcagggcgttgacagtcacaccagagcctggggaagaaagaaagagaagactgagggaggggtccagcctcacctgggaggctgtggcagcccacacccagctgtggggcttccgggcaccaggctgcttcctgcactcaaaccccatcgtccctcttgctctggaatcttagtgaagtggtcttatcttgcggagcggctctgccacatggctgctgggagccgagctttcctggagggcttcataaacccagaacgctgagcttaccccgggagcctgcatcggtgcgtggcggtgggacctaagatactgtaactctgaccagctcccagtggggctggcaccgctggtccacagaccgtctttcagaagcaaaggcctagcacagatttctcaatctcagcactgtggatgctgtgggttgggaggagtgaggggccatcccgtgcgctgtaggacattgagagcatctgggcctttaccctccagatgcccagagcaatctctccccaagccagctgtgatcactgtgtttccaggcattgacaactgcgggtcaaaactgcccctggttgagactcactggctggagccaaaaggctgagctgcctgcccaacagcagcagggaaggacatctgatccaggcagactagaccacctgggatgaacagacaatcctcagaagaacgatcgattagtgatgtctgcttcaggcaccagaagcgggcagcgtggtccacatgctctacttttgctgactctgttctggatccaccgtttggcctcccatcagcctaggat

SEQ ID NO: 376 - DNA, 20832 bp, Homo sapiens
actctatttataaagggacttcatcctgaacttagaaatttaattagaaaacataaactcggatgggaagttacagccatgactgaattggtggctctagctgaacattttgagaggactgtagagcaagaaaaaacccaaaaggctaacaagcttatgactgttcaattacaacagttacaggggccaagaccaaagggatcttctcattctcattttaaatcacaaccaagaggtattagaccaagaaattcttcaccctaagatgtctgccttattgcaaacaaccaggacagtggaatagggattgtgcccttttataccagcccaccaatgaccctccctttaggccagcctgtttcaccactagagggagcacaagagaccttagctctcctgaagataatcagcattgaagcggctctgagggatttcccagtatattgctcctcataacacccttaaaagaatatggagaaacagaggttacaataaatggggactcatgtatagtcttggtggataccagagctaccttatctgccactaccgtaaaacacactttcatacgccaacagatccctcagagttaaaaaggctatttctgtggttggggtttcaaatcaaattcaagaggttcccatatctgaacccgtccaattgactttggggcactcttcagaaaatcacacttttttactgtatgatagtgctccagtaaatttgctagagggagatttactttcaaagctgaaagggcatagaagactacctattgggtacattgtacactgcttgggaaatgggcacactaaaatctcagaactcaccagtaaagaacttgtccatgtaaccaaaaaccacctgtactcccaaaacaattgaaattgtttaaattaaaaaatttttaaaagtggggaggatgtaaaattttccttagaaggagtaagaatcagtttcctgattctcctgaaccagaattgttatgctctctataggcagaaattaataagattgaaactcaggcctgtaatgcctgatcttccaaaaatacatgaatgtttatgggtctcttcctcaactgacacaggaagaatttaaagtgtggaacttataaaagtccaaatagaccactctaaacttttgcctaaattacccaatatccactaaaactagaagcaattcaagggctctcgccaattatagaagatttaattaaacagggacttataattctatgcaccagccgttgtaacactccaatcctactggttaaaaaaaaaatggatgaggttgaagatttattcaagatttatgggcagttaacaaaattgtagtagcaaggtttcctatagtcccaaatcctaatactttattatccagtatacatgctgattcttaagtggttcacaatattagatctctgctcagcctctttttgcaatccaattcgtaaagagagtcaatgcttatttgccttcacttggaaaaatcagcagtacccctagactgtgatgccgcaagggtttaccgaagccccttcgtatttttcccaggccttgcatcaggacttaatgacattatagtttccttaaaattctactctcattcggtacatagatgacttactatatgctctcccactaaagagtgctctgaaatggactcagtttaccttttacagcaactcacacatcaaggtcagaaagcttcaatagaaaaacttcagttttcaaggggaaaaagtccattatttgggacatgacttgaagggatttccctctcacctaaaaagttaaaaactattcaaaattttccttggcctgcaaccaaaagataattaaatagttttcttggacttgcaggatatgtttttagacttgcaggatataaaattcctgggttctgaatttttccttaatagcctcaccatttcatgagctccctaaaaaatgctgtaccagagcctttatcttgggatgatagttacgagcaggcttttagctaaataaaattgaccttgtaacagcctccagctttaggacttccaaattgcactaaactgtttacctaattggctcatgaaagtaataatcaggcatttaggagttcttacccaggaacatggggagaaacataggcccattgcatattatagcctgcaattagacccagtagctaaggtatatcctaactatttaaaagcagtagcagcagcaaccaggatgaaagaagcttcagctgatctggttttaggaaatgaatttaatttggaagtcccacatgctaaattccacccaaacccagcattttttagtaagtagactaacatgaaatactctgtctccttctaatctctctctaaaacactgcaatttacttaaccatgccactgtattactgctgcctgatgatggtgaagaccacaattgcataagtgtagcatcagaaatagtggcccctcatgttaatttacaagttagtcctttggacaatcctgagttaatacttttgttgatgggtcctatgccaaaagctcagaaggaaaatatcagctaggatatgctgttaccaaaatgagttaatagagaagggaccccttcctctattagtcagctctattagtctaagctctataagtcagcttaactcttgaagatttttgccctcacccaagcttgtcgtatagctaaagacaaatcagtaagtatttagacagatagtagatacgctttaggagtagtacatgattttggcatgatagggaaactctaagggtttctcacttctagtgggatcaccatcaaaaatggactccagttagataaactcctagtttgctgttagtgatcgaagctcatacctgcagaactgaacctgaatatcaagggaatgcttagcagatatttatgctaaatcagctagtactgaaactgttcagatatgcaacctgaatgaacttcataagattaatccaatccaactaccttacaatgacctatttaataaacagtgcaatgcacctcatttggaaaaacaaaactggtatctaaaaggatataaattcaatgttaagtgcagactcacagagggcctagatggctgtctggtctttcctgagtctttgaagcttctattttcaaaagctctgtactccacaactcatcatggaacagaaaaatacgtccaaattgtgaaaaaatacttgtgggatgattgttccaaaattgctagaatatatatatatatatatatgtatatatattttgagacggagtctcactctgtcacccaggctggagtgcaagggcgcgatctcaactcactgcacactccacctccctggttcaagtgattctcctgcatcagcctcccgagtagctgggactacaggtgtgtgccaccatgcccgactaatttttttttatttttagtagagatggggtttcaccatgttagctaggatagtctggatatcctgaccttgtgatccacctgcctcggcctcccaatatgctaggcttacaggcattatccactgcacccagcctgctagaatattttataaccaatgttggcttgtcaaacccatagtcctggaaaaacaaaagattcaggtggtgtattgtattttcaccacctaatggatcatttgaacaattatagatagacttcattcagttgccaccttcaatgggggtctcagtatgttcttgtaatagtttccatgttttctggttgggtagaggccttcctgtgtaggaaagctgatgctgtgacagtagctaagaaattattagaaaatgtgttttctttatggagcatccctggaaaaatccccagcaataggggaattcattttattaggcaggttataaagcagttaaacaaggtgttatggacacaatggcactaccattgtccctatcgccctcagtcttctgaaaaggttgaaagaacaaatggcatattaaaactgaaattggcaaagttaactgaatcagttgggttgccttggccaaaggtactatcattggacttaatgacaatcagatccactctcactaaaaaacagaagtggatcccttatgaaatagtcactagaaggcctatgccccaatagtgaaacctcatgcatctttctgtctcctaaattctgatatgagtaagtactgcaaggccattataccaaagtgtactttcaccagataaaggaagcttttcaagatccaccaactgaggataatcaaaccttccacagtctagaacctggagattgtgtcttctggaaatgacatcagagaaaggctgctcttgacaactctttggaagggaccgtgctgagatcttctcaacacctacactgcagtgaagcttcagggccttgaaacttgggtccacacctcacaactcagaagggcctcttcagactcctggaactgtacacctgctggagactttaaggtaaagctgtctaaggaaatatctctccagagcagcgggcattctagctgtggacagctttcccaagatcacagatcaagacttctgtatcatcatgaaagccttacattttttcttttctccgcatttcctgttgccctaattctttctttttccctacagaaaaatccatgggacgataatcagtggatggctttagcttgagcatatgctctagcacagaaccagagtttgtggcttattgggtttgtttttattgccaaaaaaataaggaaacaattccgctaatgccaatgcctctccatgttgccaatgagagtcaccccaaaattccaagggaaggatagaaagctatccttgatattctgaacaccattgctacttgttttcctgcactcactaaaagcaacactttaacttttcctttttttttttttttctgaggcagtctcactctgttgcctaggttggagtgcagtggccttatcttggctcactacagcctccacctccaaggttcaagcaattctcctgcctcagccacccaagtagctgggactctaggcatgcaccaccgcatccagctgatttttgaatttttagtagagactagattttgctatgttggccaggctggtctcgaacctccttgcctcaagtgatccaccagcctcggtctcccaaagttctgggattacaggcgtgagccaccatgcctggccttaactgtttcaattaataacctgatcaataccaaaatatagaaaaccagtccaagtgatgcctgcaaaagatatattgtgctttcaggcatcatgcactcaagttacgggaattacctatgtgagtacaagtaattgcttgtataatatcaccagattaaattcaacagggtctctttttactaaatgtgttatacacccttacaacatactacagggcgagcacaaaaaggtcaatttcccagtggattttgttcaggagctgtgtaggtttattaatgaacaaatctaactgacccctgctcaaatgcaactatgtggccctgtttttcaactcccaagggcctatactgggtctgtggataatctgcgcatttcattctgcctcctcgttgactcagaccttgctgtttggtctggctcacttctgcctttcaaatagtttcacctaaaaattctcctaacagctcttatgattggaggccaaaatagacaataactgaaattagcactagctttgaaatagacaaagataagctagtttccactgaggaaagattccagtggggttcctggggactcactcttggtggtggtgggatactagttgtatggaatctgaagctaatccatatttggggtcttggattttatagccaatcagacatcccaatgttccagacaggtagaagctactctccaaaaggtagatgtggcctggtgcagtggctcatgcctgtaattccagcactttgggaggctaaggcaggtggatcacctgaggtcaagagttcgagaccagcctgcccaccatggtgaaaccccatctctcctaagtacaaaaaattagccaggcatggtggcgtgtgcctgtagtcccagctacttgggagactgaggcaggagaattgcttgaacccagaagacagaggttgcagtgagctgagatcaccccactacactctagcctggttaacagagcgagaccctttctcacaaaaaaataaataaataaataaataaataaataaataaataaataaaataaacgaggtagatgttacagttaatggaacatcatgcagcttcatatctcctttttactcaagctggggcctatgtttggtattgaacaaaatggaatgctgcaattttctctctactgattttgttactacagaaagcttaatgtaaaggtggctgatactgctgtttccttagacactgacaccaaatacaataaagaagtctctcaagaggaaaacatggtgtgtttacaggagcaactaacagttggtttgtaggcatcctaaatggtggatggcaagcttgggtttcccaaaggtttctagtctttatatgtcttctagtaggtgtccaggttagtatggcctgtgttaccagagtaacaatgaaaatggctacgtctttaaatcaggccactttacagtgaactatggtccttaattgctatcacatttcaaacaagaactatgaccaattaaactttactattgttgaactgcctatgttgcctgaactttgactggtttaagttggtttcatttatttcataagaactcttgttaaggggtgcaccttggtattttgatattattctcttgatagtcataataatagttccctggtgtgctgcatcctctcaagtcataaatgttttgtatgcagccatacattgagaattgaatggtctcacttcaactaggtcagcaagaacataaagaatcatttacctagtgtgaagttgtgacttgtgaacttcatagtgacaccaataaagacttgtgaactccatactgagactaaaaggacttgtgaattccatactgagccaatttacaatagtgggagagtggcatcaatgcctaaacttttgatcaatctctctaaattgagagtctgacaaagagaggggagttgataaatgaaactcaaatccggcctgaggaagccttcatattgccatgcttgagttcttaagggtgaaccgtaatgtaactagtaggcaggcagactgaaaacctaacttaggaggatgcttctttagcaatagctgagtctcagccaatcccattggccatacttcaaccactcacaggcagccgactgttggaatcatgcccagataaggcaaacaccaagctgtaaccaatctggctgtttctgtacctcacttccattttctgtatgtcactttcctttttctgtccacaaatttgctttgacaacacagcatccctggtgtctgtctgtatctgctgtaattctgagggctgcccaacttgcaaaatatttatttttcttgctcaattactctgtgaaatttaatttgtctaatggatttcttttaacagaacttataattaaaatggagagcgggtgtaaatatttataaaacttgcagcctggccatgtggtagacaaggaggaatccaagcagcctgctgagcaactacttgctggagacattagcatgtctaaaagggagccaggtgctaatattcaagacagtgggaaaaggcctcagaggcatttcagaaggcccctcctatcacaggcccacaggcctaggaggactgaatggtttcagagaccaggcccaggacaccattgccctatgtcacctcaggatgctacttcccacatcccagcttctccagctccagccttggctcaaagggccccaggtgaagcgcagaccactgctttggagggtacaagccctaagccttagcagcttccatatgtttttttttttgtcttttttttttgagacagagtcttgtcctgtcaaccaggctggaatgcaacagcacgatctcagctcactgcaacctctgcctcaaaggttcaagtgattctcctgcctcagtatcccaagtatctgggattgcaggcatgtgccatcatgcccagctaattttgtattttcagtagatacggggtttcacaatgttggtcaggctggtctccaactcctgacctcaggtgatccacctgcctcagcctcccaaagtgctggaattacatgtgtgagccaccatgcccagccttccatatggttttaggtctgcaggcttgcagaatgcaagagtgaaggaggcttgggagcttccacctaaatttctgaagatgtatcaaaaagcctgggtgcccaggcagaagcctgcacagggcggagaccccacagagaacctctactagggcagagccatgggaaaacatagggttggaacccccatacagggtcctcactgggacattgcctagtggagctgtgggaatggggccaatgccttccagacaccagaaaggtagagtcgccagcagcttgcaacctcagcatggaagacccacaggctcaatcccaacctgtgagagcagccatgtgggctgcacccagcaaagccatagagacagggctgctcaaggccttgaaagcccactcctctcaccagtatggagttaaggaagatgattttggaagtttcagatttagtgtttgccctgctgggtttcagacatgtgtggggcctgttgcctctttcttttggccaatttctcgcttttggaatgggaatgcctacccaatacctgtaacacagttgtatcttggaagtatgtaacttgtttttgatataacagcctcatgggtggaaggcatttgccttgaggctcagatgaaactatggattctggacttttgagttgatgctggaacaagctgagacattgggaaactatcaggaagggatggttgcattttgcaatgtgagatgacatgagattttggggtaagaggcagactgatatagtttagatgtttgttctctccaaatcacatgttgaaatatgacccccaatgttagaggtagggcctagtgggaggtgtttcgctcataggggtggattcctcatgaatgggttggtgctctgtccatggtaatgaatgagttctggccctgttagttcacatgtaagctggttgtttgaaagcacctagcatctttcttgtgtgctgtctcgccgtgtgacacacctgctcccccttcagcttccaccataagtgaaagattcctgaggccctcaccagaagcagatgcctgcactgtgctttttgtacagcctgcaaaaccatgaaccaaatacacctcttttccttataaattacccagtctcaggtattctgttatgatcccctggaagagttatactacttccaggtctagaccatggtaaatcccacactcccctctgaggccaccttcttccctctgcagagaccctgtggttagagtggattggttgtgtctctggccccaattcttctcccgaggctgcattccacccttttgctatgtgactttgcagcccttcatgatcattacagaggcaggttcctctctccttgaatttggggaagatgcgacgcatgcaggagtttgaaaacacgtttgtttgcttctgcttttgtttttgctcctctgcaatttccttgaaaccatgcctgagctagcctgagggaaaatgaaaaagcaccattgagctaatctttcagccaatcccactgcatttgcacaatgcagtctgagaccagaggaactgcccagccaagctcaggcaaaattgctgacttcagactcatgagctaaataaatattgatttcattttatgattgttcttatgcaacattatcctggcactagaaaaatgaaacagatgggaatcaaaaagactgaatgaagcagaaacccagaagctaccccacaggcaatcgcatgggactcagatgttaatggacaataagcttttattgcacagaaaggtcattgcagtcagaggttggggattgcttgctgctacagccgaatggattctattctgaccaatacagaaggaaagaaatcatagacgccctgcctgagcagaagggaggtgatagatgaaatgaactgtatgaagatccaccagcctggcccacacgtggaagaaggactggcccgtcttcttgaagcccaagctctggtagaggcccatggcagagagctggatgttgctggtgtccaggacaacttcactgtagccctagtcccgggcaaactggaggacagtcctgaccagggcttttgctatcccctgaccacggtgctcattgtccacagagagatgaaacagctgcaaccgcttctccctcaaggtgggatcatcaacgggcagagctcctactgtgcccaccaccttctcttcagattcacccacccagaagcaggagccacactcactcaggtaggatttggtgatgtcagacatgtctgtgcgcaatgctatgtctacataccgcgtccagggttttttggcaaggaaccacagggcaggaaggaggctgaggctgaacacgagggccagaatccaggagccagagaccaggagtagggcaagggcccccccaagtaagagtatgagggttcgaggcagcttcagtaatcgccggaaggtggctggggcgtgttcggccatcccccgggagagcaagcccacgacctacttgcggtcgctctcctggtatttgcggatgtgataaggagccatggacagacttctgtgtctgaagtcactgagtccaggaaacagagctaggcctccctgcacgcctttacgccaggcctggggaagagagaggaaaccacgtgagtgcctgcatggctcccagccttgcaggaacagggagacctgcttaagggtgtgtctttccgcgtttgcccatgaggaagcaggcctctgccactgggagaaggtagcatgagaaagacctgcattggaatctggctccatgcctttctagctgtgtgaccttgggcatgtcacttaacctctctgagcctccacttcttcatctatagaacaggggagaagaaaacctgccttctagagttgtttcgaagattgaataaaataccttctataaagccctgatagatgaactacccaccactcttccctctgtttcctttttctggctctctcagcttcttggtgcattgagagagtacctacctcaggcaggccacatgcccaaccctttggtgcttctccagggaccatacatcgcagaaatcctgtgaccaagcacaagtttcaggaaaggctccctccagctttattgtaagtttttaggttgctgaggtggcataagtgccaagcataaaaaacagcccagcctccagatcccaaggaaggtgcatgctcagagcactgtccttccacccagtcccctcacctgtcaccacaagagccttgagtgtccagggagcttcagctgtcagccgctcactggcatccaggagataccgtctggggcttgctcacccctggaaagcaggctgcctgcctcattgcttggctcctgaatgtttggtaatcatcaaccctagggtcaaagagctgggctgtaacacagcagggagcccagtgtgcattcccctttatagtcaaagggaatggcctggagggggaaactcagggtctggaaccgcctgggttccttgcccttctggaaggcctgccacctctcttgcctgttcaggccctgggcatctttctgccacctggcacacttgatactctctgagatccaccttggtccctgtacacatataccacgagcctgagaactgtgccattcaccctgcactcagtcaccattggccagaagccgagtccccacacttggcaacaaggcccttcccagctaggcttctccatgctgaggtttccctggtccacaaagcatcgattgttggcagttctttgcactcacctcaccaacccccacctccacccattcattgattcagtcaacaggtgtgtgcgatgcacttcccatgtctgggggtcatttcagccatgagcaaggttgacattcggctgacaggcatggctgtgtgtggcttgtgtgtgttctggctgttggtcagaggctgtgccacacccgttgttaaatattttgcactgcagatgttggagaggcccaaattcaagctcttgtacccgacgtggagctgatcccaaacactgacacatgggtgcttggagatagagaaagttgtattcgatttggccaaagcaagaaggcaggagaggaagatctctcaacttcagttcaacaaagaagcagcagcagaatgtttttatgcagctagagagtgaggaagggggagttcagggggattgagaggaaaagtctgtgtttcctcagtctgagataacaccttgtgcaaccaggcttctcagtgtcagcagctggtcacagtgtccttcaaggcattcattccttctgcaaacttttcctgaccctgaaggaatgtcttcctgctgaacaaagaaacagtgcatgagcagtttatcattatgttgtgggaacaaggaatattggaccaaaagcaagtggttaacatgtgcaagccagcaacggtctgatcagaatgttcattatttcagtcactaaaacatggtatggtgctgaaatctcaaggggcccaattacaaggatgcaacatatacaagataggcaaaagcaaaacctaacagaaaaagcccttttccacaccaacttacatgctattgaagggaaacttccctaaaagattagccaacccattgttgatcagccacgctgggcccgtcatctaggttaggtagtttggactctattccaagagcaaggggaggacattgatatgcacagaggggagaaggggtgtgtgtgtgtgtgtgtgtgtgtgtgtgtgtgtgtgtgtgtgtgtgtgtgtgcgcgcttcactctggctgcaggtggacaatggatctgaggaggtgggaatggaagcagctaccccttaaggctagtgccgcatccaggcaacagcagggcccccagtgcagggatgcaggtgctcactgtacaagagcagctggcccagaggggctggtaggagctaaaatcgggcctcccgttgccaagccatgagccatggcacgaaactgagactggccaaaggaaaaggcaaccttttcttatttgctcgaaggcattgcttgcctgctaaactctgcatccagtggactgcatggcttgaggctgtgcctagctctgtgttcacaaagaagccgcctgggctagcagaggcccatgagacagcagtggcttcaacagagggaggaagtcaagaatgtgagacatgagccacatggaggtgcacttggggcagaaatggcaggagttggaatgattcacacagggaggaggatgaggaagggctcagagatgacagccaggcttctggtaggggcattcaggaaaacactggagagagcccagatctggaaaagtcaaggcttcccctaaaggtgctgccctgcagccttcctcagcagaaaccagaggctgggagtcagcagcaggaacccagggccagccagtggaggctgctgagattccagatctttggtacccaacaccacctccgaggaaaagtctaaggagcatcaagtctgggcaggaagtccatggcttatctttagagtgttctcagaacagttcagtgtcaagcaggagttggcctaggaattacaagaggtgagcagctgcttcaaagcaccactgagtacttctagtgtgagtctgaccaatattcagagtcagaaacctgccggtcacttggagggggagaggtttgtgctccgtccctgtgtgctgtctcttcctccatgctcacccgtggctgtggcttcctcaaaacacagcgacctcacttgacattcaggcatctcttgctcccaggatctactgtgacttctgcatttttgtagctttcctgataaaagcctgggctttccttgtcagacctgaaagattcatttattcattcaacaaacagttcccgaggacctgaggtgtgccgggcctggacttggcatgaaggcaccagatgttggaagcgaggctgccgcccaggaggacacacctgatggggctctgggaacaggatgatggtggagacatcacatccggaataactttgttaggagggttgaacttgacagttaggacttttatgttgcacttgttgaaaagccacctaaaattgtcataagtaagagaggtgatctaatggcccatgaaactgccaactccaggaagacagacagggtgacctgaaagtgggtttgacctgttggtttttctgccattctgtgggtggcatcagcttcctgccaagactggcactgcataggatgtcgggtgtttgccagcccagttgaagctgtctgcttccttgctcaccaacagcagaaaggtgggggctattccccacattccaggtgacagagaaggtttacatggggactcagtcacactttctggggactgtacatttcatagcagaatccaggttatattaaaggagtcctggccgaaggatgccagcaccccatagagatggagagccccagggagctcaagggctgaggggctgaggggctgagtgacagtgagcactgcccacagagggggtgccctgcagtcaggaggggtgggaaacgggtgcagatcggcagccaacagaggcccacccacatgagcacaggtggagttgctggtgcgatgaagagtgtgctggttgggagtggagggctgggggccggtagccggtttgggaaacccaagctgagcgaaaggtgtgccaaggcctgtggtggtgcctgttaacagaaaaatcaaactgttagatgatctgaaagaggtatcttctgagccaatatgagtgaccacggtctggggatctcaagaggtcctgaaaacgtgtgctggggccgtcgttttctacatttgaggggacaggaattggagtaacatcataaattaatccatggaaggtgtacattgactgggcctaacaaggtgggatattgtgaagcagcagggggcattatagatcacaggtggattcaaagattttccgattggcaattggttgaaagagttcagctttgtctaaagaccgtgaagttggtacaaaagaatgcttcagttcagagagaggggtctgcctctgccacgtgatgctgtcccagagtcaggtaggaaagtcagccacagtatcctgggtcaatttaaaccccactgaaggagactctgtggtttctagggtgtgtgttaattcttgccttgcaaggccttaagtcttgttcataatctgttactgattgtcacagagtccattctgaataatctaatgatgcctattttaacattcatgccagtcaagtgattctcctgcctcaccctcccaagtagctgggactacaggtacacgccgccatgcccggctaatttttgtatttttagtagatacagggtttcaccatgtttgttaggctggtctcgaactcctgacctcgtgatctgcctgcctcggcctcctaaagtgctgggattacaggcaggagtcagcacgccaggcccagagttttctaaatgagacttggtgtagccagtgagcttctgttgcctgctgtgacatgggtgctattgttcccattaaaaactcagacctctgcctcgggagacagggctcagctgcagcctactcaactaaaacatgaagcgctgcttcgtgggcaccacagcggctccttaaacttgcaatggtgtgcaaatttgtgggctcactttctacatccgatcttcaaaggtgtctgcgatcccagaaggttgggaactattaaatttgatcatttctgaaatgtcttccagtttaaaagtcttcagttccagttcattttcaattcctgaataaagggatgagtcttggagcttctggaagctggcctggaactgagcacttactgcagacagtgcctgaagtgcaaacccaaaggtgcgtagatctgggctgcatgtgaaagctttcatattcaggtcttactttgcgacagtgaggggtgaccagggaagcctatatgaggggcgggggcaaaccaaggcagcctgggagctgccttaaccacctctcacctcacttcctcagagataaggttttcttgaagggaacgtgcagatttatacaaaatactaacaagctgagattttaattttttaagcaataaggaaaaacagaacttttcactccaaagaccctgtgttaggctcggcagaactggtggcacatctcaggagtcatggggcaatgctctcagaaacaatgttagggaaaaaaaaaaaaaaacgaaaaacaatgaagaggcttaattcttcttgttaaaggaagaggtatcctctgtcccttttcttagagcattttgtttggaaaacttgtcattttaaatccttcctctgcccctttgaggggcatgcaaagctttttgacagctaaataagcctcttgccagctttgcaacccaggactgtgttcctgaaggacctgggatcccaatctttgaaacgttatcatcagagcagccaggtccctatctcccagtctccatgggagggcaggaacctaacttttgccctgtgtgataaatctacctcctatcataaagataagggttgtttttcctttgtatgaagtcaaatagcagacgcaggttgtcgagtgaattgaggttgaatctctgtaaactcggtgtgaccaaaagtgctgtgcaggccccctgacctgaggactaggcatggcttctcttgagaacgtgtgcaatggtttggacccactggctagattagcggtgagatttctgtctgtctttgcagcttcttagcggatcattgcccgtgatgcgcatctcactctgggttaatcctttttcaaggataaaagtgtttttctttctcttcttcctctgcagagaggcttgctgggatgggagaagattttatttgtaattccatttctccacgaccagaggatgggctctgggggtcaggcagctgggaaggagtttagaacccatgcctaggccttccccaaggctcatgcactcagttccctcagttcagcagtagcagaaacactatctggaagaccccatactgtctggaaagaggaactcattttctttcattgctgacactcctggatgactgtgtgtggcggttacccataccctagtcccaccctgtgccccctctccacctcagggggccccaagagccctggccctgctagtccagagcacccccaagggagactggggttgggggtcccaccagggtgccaggtgttggtcaaggtgaatgtgaactaggaggaaggagatggagccctctcctgggaaccggacagggacagggatggggtgggggtgcccaggaagccatggctctgggctggggccgccaacctgcccaggcaactggggctgactccttgaagttgcatttctgactccccctcccacgtgcaggctcttggcccactggaggcccactggaggccacagtggcaggttcactgtgggcgggggtgggggggatggggtgccctggggagctgggggttcctgtggagcaggggtatgggtcccaccctggccaccccgtctgcccaggctccacatgtgccccctggtccccctggaaagacccttctctgtcccgctggtgcacccctcccccaactgggcctccaccaagaagaagggcccgagttctgccgaggcgtccctctgagtgaccacccacacctgaagccatcagtcaggtccctgcacaggagccacccctgagcctgtgctcccccacccctggctggctgcatctgggctccagatacgtgtcccccacccagaccccattgctgggttaggcccttcttgccacccctcagctcttctccctagggaacagcatcattgccaacttctcatatcctgtcattgtccaccaggagagctggggcgggggaccccgcttgtgcataactggcctcaggcagccgacctggggctccacagctcttgctgccgctggaagttgggccaaggctggtggcacacacaggtgtgttcctgctgttgggatcaccagacaaggctgcttcgccttgggccgatcttttgccccggaccactcagccctaggtactttaggccaatctgctgatcaaggccataagtgcctcataaccaatcagcagggtaccttcccggcagcctcaagggtgactaggtttctaccacaccctgatcccaggccttcctctcagccagtcctacccagaacaccctatttcacagtgcacttcacccctagcctacctggccattccctatccccatagctggctctaagttttcttatcacctctaacctgctctaaatgctaaggatatgcatctgttgttgatttgtatttagtaggctctgcaagcagggatctttggctcttcggttcactcatgtatgttaagtgcccagaacaagcctgacagatattaggtgctcggtaagtgcgtgttgagtgagtaaacaacagacagccagtttgggtattcccagtagggcaggaacagagaagagacacgttttattgggaagctaacaaatcttaagcttcaaagttcctctttcccctgcaccagcaccttacaaaaaaaaaaaaacctactgtggttttacaatttatattttgcaaacaggctctgaaatgtatttacctcaggctccaaaaaacctggatcttccttgagggcagtgctgcctactggatgaaatacagattttagagtcagagttgggttcaaatcctagctctgcctcctgcaggtgtcttaacctctctgacccccctctcctaatttgtgcaagggaataatatccccacatgtgtaagactcaacagggtgggaagggcacatttgtatctaacctgaatattaatatatgcattccacagtttcttttgtatgtatccattataacataattttaaaaactgatgacacgatctggttttcaaaacctttctttattatttgtggaataaagttcatggtacaaatatcaacagagtcgaaggcttctgtgatgggtcaagtgagatggggcctgggaagtgactgatattgaccacaggatgcagcaacatggggatgactgatgaccttgacaggagcagcgttggttcagtggtccccaaagacctcctgacaggggaaggtttcacaggagaggaactggagctgagtgcagaggacaccatggagcagttttgccacagagtgaaacagggagatgcctggcagctgcagaggagggtgcagtcaaaaagatttgttacagaactgccgtttgactcagcaatcctattactaggtatatatccagagaaatagaaatcgttctaccatagagatgcatgtgaatgttcattgcagcagtattcacaatagcaaagacatgcagtcaacctaaatgcccattaatgacagattggataaagaaaaggtggtacatatacaccgtggaatactatgcacccattaaaaagaacaagatcatgtattttgcaggaacatggatggagctggaggcccttatctttaccaaactaacacgggaacagaaaaccaggctgggtgcggtggctcacgcctgtaatcccagcactttgggaggccgaagtgggtggatcacctggggtcgggagtttgcgaccagcctgaccaacatggagaaaccccgactctactaaaaattaaaaaaattagccaggtttggtggtgaatgcctgtaatcccagctactttggaggctgaggcaggagaatcacttgaacccaggaggcagaagctgcggtgagctgagatcacgccattgcactccagcctgggcaacaaaagggaaactcagcctcaaaaaaaggaaaaaaaaaaatcaaacaccatgtgttctcactcataagtgggagctaaatgatgagaacttatgaacacaaagaaggaaacaacagacactggggccttccccagggtggagagtgggaggagggagaggagcagaaaaataattttgagtactagtcttagtacctgggtaatgaaataatctgtaccataaacccccatgacatgaattcaccaatataacaaacctgcacctgtacccctgaacctaaaataagagttaaagtaaaataaggttttgcttcctgggatgtaggtgaaataattgtttgctgaagagatccagaggcaagccaaatagtgacggtataggggtggggatacctttgggacggtgctcttgactggttgggaggggctggcccgtatgagacagtcaagcaaaaggggcaggcaggaatgtgaacagggactgacagtgtgttatgtgctgggcttggcagaagttctctccattgcctcttctgttgtgtcttggtttttaacaatgaactaggaaaggatattaccaactaagagtgagggtcagagaagaggcattgttctttgagggggagagaaatgataagccgttgtccagtagttgcctcttctgttcagtaaggacagaatctgacagggtggagctgggggagaagaagaaagccaatgaggagccagttctgtgatgaaacttacagg

SEQ ID NO: 377 - DNA, 277404 bp, Homo sapiens
agtttacctctgctcctgaggtgtagctttctaggatttccaacttacaggctggcatatttatcaaaggcctgcctccttggtaagcaaatcagaaataaaattctaagaccccaattatctgaatgaattcctcctctcaaccaacagcattccaaagttaacctgaataactagttcaggccatgataggaagtgggagttggacatgcctaattttacctcctgtcttttggaattcaggaaaagccaaccaacattcacatcaacacagactttaagtctgttaagaaacatttacagtctattctctctgaagtcagctacctggagtcttcagctgaaagataaaactttggtctccacaaccccttattgtaacacagacattcctttctactgatgccaggtgtttagataatttcactctttcaagcaattgccaatcacaaaatctttaactgttcctatgacctgggaacccccactttgagttgtcttgctttgcacattgaatcaatgtacatcttacatgcattgattgatgtattatgtctcactaaaacgtataaaaatgcaagccgtaccacaagcaccttgggaacatgtcatcaggatctttcaaggctgtgtcatgagcatgtccttaaccttggtgaaataaactttctaaattgattgatgcctgtctcagatacgtttgggtttacaacccttaactctaatttttgtccccaaaaaattgccaatagttctgtgtagctacttcaccttgcagttgacattgctgctcagcctcaagggtgttagaggcacagtgtactattaggtttacctctctgtgtttctcatctttccaggagcatggcatctcaagtcttaactgccttggtggttctctgatgcttcacatacaaacacacgtacacaaaactgtttctttttcttcttctccttttccttctactcttatacctctagcttccactcctcctctgtccctcctcctttttattaattacccagctttttgtacttattctcagtggtggggttggtatacaacaacctaattcatcattacaggaagccttccatgcacttggatccatttttgtattttctattcggttccattagtctatctagtcatgccctattgccaccctgttttaattatcgaggctttaataatacatttgttatctgatagggttagtgcatgagtgcatgtttgtgtacacatgcatatacacacacacagctctttttagtgtttcccagttatcttgtctgtttatgcttccaaataaacagtataatcaagttctttaactccagaaaaaaatataatatgtatattaagataaggttaaatttgtaaatttacttaggaacaactggcatttttctaacatttactatttctattcaaaaacatctactcgagtttactctatgcacttcaggagatataattttcctcacatagaagttagacattttttgggtgaagtttttgcttaggtattttaaattgtaaatggaatcttctctttcattcatcctctaactgattgttattcatatatgtaaagagtagtgatgtaatttcttgcatgtttattttatatcttgcaactttactaatttgttttgtttatggtagttttccatcaattattttgagctttccagaaaaataacatagtgtaccaatcgagatggtttcaccttattctttcaaactctgatgtttctaattgctgtcttgtctacttgtatggactaatttctacaatataacattaaattttggcagagagactaggcatgttgtcttgttcttcctttcaccagaaagaatctagagtatctccattggggaagatctggcttttggattaaatatcattttaaggatgataatgattttaaaatttaaatgatacttaaaatgacgattttaaggattaatcattgacgattattgagtgctttttgcatcactgggtattgggttttgttaagtgcctttttgccatttaagaaaatgttcttattttttttccacagctctattaatgtgaattacattgattgttttcttaatattgaatcattttgtgtttatgcaataaatcctacatgttgtgaggtattattttaaaatatgctattaattctttttgctaatattttattttagaattttgcatacctatttataagtgggaatagtctatagtcttctattttgtacaatttttaagattttgatatgaattctacattcaattcattaaaagattttaaatattttccttattttttcatgctttggaatagtttatatagcatttggatgatctaggatttaaaggatttttaagatgtcactctgaaactttgcgagggtgcttctttatatctttatttttttcttttaagtttggtccatttagattctatgtttactgagatcaattttagtaaattaaattttcctataaaatgcatttttaagtatttcaataaatttctatatagttgtgcagaaaagtctcttttgatgttaattcctctctttggtggctctcattatcctctctttgctctttcttattatgtatgctattattttttactttctcacatttaatttatttaattttattgatttttagggaacaagatttatttattcataaattctgagttttttgtttgttaattttttaactttaatatttcttttcttctaatttcttcatttttctaatttatggcaatagctgttactcccagttaatacctatcaggcaattagaaagcattctatttccatatactctacctttcttctctcatttttgtagttaaaatttattcagatgatcagggcatatattaagcatatactattctatcacctttatatccaccatcacctctacagttaaatatctttagtggccttatggtgaacctgccccagtatttcccagttgtctgaaactcattttctacttgattcttgaaaaatgttccttgaggtcttacatactcatagccttctctatgacatatgtatatatattatgttgtgtgtgtgtatatatatatgtatacacatatgtctatgacatatggtataatttatcatatttatcatatggcattaatttaccatattttcagttccatttgatttttaatatttttttcctttccattttctatttctcttactgtattttcattggtgtttatttacttttgttctttccagtttagtcttctgaattttttctctcatttccaattttttgtttacacttttttatttttaattattacagatactagttgtatagttgtatatatttatggggtacatgtgatattttgataaaagcatataatgcataatgatcaaatcagggaaactgggatattcatcacctcaagcatttatcatttcttcgtgttaggaacattccaattttatgctttcagttattttgaaataatcttattccttctatctaactgtatttttgtatctattcaccatgccctctttatctcccctccccactacccttcccgccctctggtaaccatcattctactctatctccatgagtttagtaatttttagctcccacatgttagtgagaacctcaatatttgtctttctgtgtcaggcttatttcacttagcataatgtcctccagttccatccatgttgctgcaaatgacagaatttcattctatttttatggctgagtaatattctattgtgcatctacctgtactacattttctttatccattcatccactgatggacacttgggttgattccatatcttggctattgtgagtagtgctgcaataaacatgggagtgaagatatctctttgatgtactgatttcctttgttttgaatatatacctagcaataggattgctggatcacatggtagttctatgtttttgttttttgaggaacagagaaagaggaaccctctacaatgttggtgagaatgtaaattggtacctccactatggagaacagtatggaggatcctcaattatttcttgagctctgttttctttcttttagtatcctcctcttggttagccttttaatttttgccttgtctgattgattatgcaacctttacagtttttattatttttctaatgttctttagctggttttgaaatattaagtaaaaaaaaacttttattggcctttttgctatatttttctagtggatcttcactgttcattattgtgtcagtcagcgcatgtacgaaataaaatgtctttgcttacaagacattttattctgaaattattttctgttgctcacgttttattgagatggattatattatattttaggggttataatgtaggggtggtagcagaccagaatagccttcctagattcatgcatggctttaagaccccttcttcttttgtttctgcaaaatatttacaaataggacctctttgtaccttctgttttctctggtcccttctctcctttatatctaggacttctctccattttctatttatatagatttgaattctattttcagtagactttacttagtgtggggttctcttcttacagaaggaaattttggttgactatttccagaggctctggaacttgagtgcccctgcataatctgatttcactttagtttttctacacccatctacagagttgctgctctgtaacctctctctagttttggcaattattctcagacctgcctgctaggtttccatccaagagcagacttctgctttagtaggtgagtacttgtggattcttggtactccagctcacagaaagttggaagttccccctttctcctctctgttactgccaatagttggtaatttttcttgcctatccatattctagaatttgtaagaatgatccttgtgtttgttgaagataaccatgaggttttacttttactattctagatgctctaaccattttgtaaggggaattgggatggtttaaaagtctgcactgatgctgccatgttgccctgactaaaacctaaatcacttcctttatttggttttggagagacatcatactacactgtctttctatcctatctcactcggctggtttttctgagaattatttgtttatggtgtgaggagaaatttcatatttactcccttccctaataacctggcacacacttatgagataatctaatctatatttgtttaaaatgttacccttgacacacactaagtatatgcacatatagaatatccctcataaattccttatgttgtttgtactttaaatattgatacattttgatgtaaatattctaggcatatctactgaactgcattttgttatcatactgatagaacttcattctgccattctgctatagggcagttacagtttattatgagatcagaaattaaattaaaccaatgtgcttggtcatgtcatgttgctgtctcaaacaatatgcttttgaatgtcatatatagcttgtttctcttatgtctaaacttcacaagatatacatgtatattgtggggaaggcagagagaaggaaaaaaaccaaactggattacagaagaaattactattcctttggcattttataagatattctataatattttgatataatgtttaaacttactttctctctgctttgtgactggctaaaatcacagaactattgtagcattctcacctaatgggttcaaggctatgtgtcacatccttgcattacagcatcctctgtgcccgttcacatatgtactcattcattctaaaaaccatctgtacctcataatgcaagtggagacagaccctgagggtttataatctcacaacgaaatccatttatttagttttctaaccaaaataatgctttctcattcaagagatgtacttgtgcatctgctatttatttggcatgcctttcccctctctattactcacttcacagttttggtttagcaaatgcattgggtgaaatgaataaagatatgtagaccaaaacagtaggaagtgttaattgtcatcaaatagccaagttctgagtttataagagaaaggtatagtttgatactccagccactttaggctggatctttctaagatggccacattctgtttctaatagacaaatttctttgatctatatggaacaatttaatttatgaataatttatgcaccagaattcaaataaaattgacaatgtttgagaacaaactgttgaccatgcccttgtcttattttatactgtggtttaaaagtgatataaaatgtaatattttaacataaactcacaactgtcaagcgtgcactcattttaaaaacggactggccatcaggaaaaagattaggtaatgaaattccacattctgacccactgtcttctgaatgtccatttatttgtttatgtgaataaaagcaactacttaaaactgtggcattctcagtgccagtgtagagtgggaaatacggtaatcattcctacttttgttctgaaattcaccccaaaaaaacacaataaatgcaagttttcatggtcaaatgtattctcattcattatcatctagctttcaattcacagcttgatacatctaaattgtcagacaatggagagagagatttgagaggaacacaaaggaaggaggaaaagagattcttcaaaaggatgaatctgtgaagggcaaatgactcagaaaaatcttcatacactaaaaattactttttaaaagtccctacccatctactttcttgtatttctctacttgtgtcctaattattcattttaagatttaattgtctatttctcttctgtccctgcctgcctctccccctcccttcctctttcacttttctccttccatctttatagtgggtaaaaactcccactgaaatgcttcgtttgggtcctaagcaaatcttctgcaactccactggatcccagtatccctcctgtacaggaccatcttccattctaagttccttcagttatggccaaatagatgtctctatacctttgagctcaagtaaaacacgctgtgaaaataaactcaatttgcttatctggaatatcacgtgagaatacactgaccatattaacgccatatattttattgctttgaagtggattatcttagatccttagttatgtcttgctttttaaagttaaggtatgtatagaatggcagaacaaaagtaacaaagtgtctgtttggatgaaaataactaaaatttacaattaattttcattgctataacttctagaaaacacagcaaggagggctaaaggtgaaggtgctgagaaacacaaatcctgtctcaactggacgtctattatagattgaatatgaatacatggaggcagccagtaatgtagagtgcattttaataatttttaaaagagttaaatgatcaaatccctaaagatacagcatttttctttttctttgcccaggaatctgttttggaagccaattcaatgattactactaggacatggaattttgatatccatttggtactgatttacaccagtatttttaaggctgccaacaagaaagtccagaatttcatcaggcagccaaaattccacaagagacaactgtcttttattttatagcttatgaatttggggcttaatatgattttccactaacaagttctgtaccccctccagagtgctaaagccagtgcatagatcagcaaagtaacccagaacatatgaggcaagttaatattaaacttgaaggaaaaatgtacaaattatattgtttacttaggaaaaaaagcactctagttgaaagagctgacatacgatttattgcaaacacttaaccagcgtgttcacatttttaaccccattcccacttgtagtacttgtttggtggcattgtggcactggatacagactgataaacccatcaattaaaaatccattaaatattggtaaaaaagctctattacatgtcttctcttgttatgcaatggctagaaaacatacagaatcacatccataatgagtaaataaatcacagtaataaataactaacttagggaataggtagatgaataactctttttaagcataagtaaatgaagaacctgtttaattaaaaacaacaaaatgttcttagtttccagaaataattctattgtgaaaagaaaacttccatatataattaggaaaatatagtatagggtttctttctatgctcaaagcaatgttttcaaaagagtcagagataataaatactggaacacataaatgattaaatatgtgtgggttttttttttacataagtcatgaaatcttcttccccagatgccaggaagaaaaggagaaacatcatatatcagtcccatagtatttaaattttctactcctaaaggatttttcctaggatttcaggcttattcaaaaaccttcatgtttcatacaatttgtaatatagctttatacatttgttcccaatctcagtcagcatagatagataatagaaaatatcagcataggaagctgtagaattacttatctacaaaaccagacatcaaacactgcaccttgcaatattttttagtaaagagaaattatgtcacaaaatttcacagatgaggcctatggaagaagaacacaaaggaactatatctgtagtagaagcccatcctaactactaagaaagccacacgataccctttagatttcacattagaattcctaaactgttagcctaacacctggccctcatgctgaccacaggaagaggacttctgaaccaccatcgtcaggatgctgtccaccttcctgaaagggatgagaatctgtgagggattcccaggcttatcagaaagaaggctagagcattgtatgtgagcaccatctagcactgctatatttctaaaatagtaattgtacagagtcattttaaccatgtgccaaactgctccatctaatgacagttaaattaaagctgcaagtgtgtgagcaaatggtaaaaagacttctgacttctattcttaacttttatagtagaaacatttccataaaaaacttcatttaaaaatatattgctaaattactctatgagatttatcattagctaatgacatgatttttatctacacaaattttaaaaactgacattgagtggataaattatttcacacaaaaaagttactgtatctagaagaaaataaaatgaagacattgctataaattaacctttgaagtttaatgtctttacccacacctacttataagacaagacctgaaaaaaaagccattctgtttgtaaagaaggccaagataatatgtttcaggtggtagcaaaccacataaatattgcgagtatcaatcctggccctctatcaggaacatgcatttctggtttattgaatcatgaataattatttatattacctatcattataaatcctatttgtttctccctattgtcacagagttatgacaaatttccttctgaattttttattagttttccaaaagactccacattgaaattcaattatggctaaactctacaggtgtggtatatggggaaaaatggagaaatactcctctaaatatatcagatccaccaactattgctttatcttaaaatgaaagtttattcctctagacttcccctctctgctatatgttctgacctaaactcattctccatttagcctttactagtttgtttttgatatagcagtgtgatcagcagcaatgtgaccagagtacactatattttgtttccatataaacattctggcagtcagttaagttcactgtgtcctttggaagtctaatcatacagacaacaggtctgacagaatatacactacttaatatatacaaatgtgagtcctgagagcaacacataaggattaaaagaggaaataacttttcattaaggctggaagaaattggagaaactttaatggggaagttttaaaaactctaactaaattacatcacttgcttttagataaaaatgagcccaatctcgagttgctggcttgaaaacattttgttcattcattcatgaccaatggtgagcaggtacttggcatcccagtggtttcatatttgaacttcatcttctgctttaagttcatggcatgtaccactgatgtgtgttcctaataattctccttctctcaacagtggagacaaggcaggaggctgcatcgtcaatagggaaagagatggagaaaaattgggagtcatgccttctggcagagaaccaagatggtaggggatgggagagcgtgggtgtttcggaggcacctgccccaggtttactgccggcattcttggtgggactgctttaatcccaggctgggctactgctgttatcaaagggggtggaaaaacaaaagatttcttctcttttggaatgccaggcatatgcaaatgttcatcctttagttttgcaatatcattaaatactgaggcaagaggttggaatttgggctcccaactaagaagataattccagtgatagttgtcttttccatcatgatcagaggtcgtctgagttgaaagagctgcacaccttacttcctgatcacctgaaataaagacagactcttttctaacgtcagccaggatgctctcttttgcctctctcttctgaactgtctggggtaacacattattttgagcacaggtggtgctgcagccttccccttgatctccttccccaaatgtttggctggcttctgctgtttcggcagtcaccatcacatcagtttccccagataggcaggagagctggtctgagtccctcgggatacccgagtctggcaccctggactcgtggtcactcagagctgagtctgagcactttctgtagggatgctcatttatcctctggatttccttatcttctgcagtttctccttccacagaacagtggccactggagtttgagtgtctgtacagattgacaatatccttctccatgatacttattaaactcaaccattccggagtggcatccacagggaccacctcgttactgcagtcgtcagttttctggaaggctttgagcacactggcatcccgggtcactctcaagtccgcatctaaagatgaggttttcttctcctcataattgtttattgtgtctttttgtttatgtcttaaaatcattacaattagaatgcagatgagtatcagaaacactaaaaaggagaccaccaggctgattgaaaagctgctggcgaacactgccaagggtgttccttcagaggagaaagacacattcacaaaaacagtgcaagatgcaaacttggaatctgatttgggactatgagcgattattttcatttccaaggtgtcttctttgttgagttgactttttattaggggaagggctctaatcaaataaatatttccattggttttatttactgaaaagaaaggagatgaggttccaagggagtaaagaatgactccatcaataccagcatctgcatctgaggcttccactctgccaatcaactgtctgtctttattcttttctgggagggtgaaaaaatactgatcttgagtgaaaatgggctcaaattcatctatcccttcaatatccacccagaccactaaggaggcagttgcatcacctttgtctttggcttggactgtgaggcagtatttattgccattttcatagtcaaggatttgcttagcatgaatatcccctgtcaaagggtcaatgaggaagagatcatgatcataagacattccatgagtgagaaaacagggtgatacaatagaataggtcaattctccatacggaccagcatcaaaatccagagcatttatagagcatatggtagaggaaataggcagattttctggaacaatacagctgaagcttgagaacataaactgaggtgcatggtcgttatcatccaggacactgacaaacacaactgcaaaagaaaaatgtttcttttctgcatctgaagcttggacagttaaggtgaattttgtcattttttcataatccagaggtttaatcaaataaagaactccagtgttttcttctaagtaaaaatgtcccttctcatttccagagatgatgttgtagatgatttctgcatgtgaccctgtgtcacggtcatttgctgagaccacagtgatgtgactccctagaggggtgctttccttgacatgggtgtgatagctcaggctgctgaagtttgggggattgtcattgacatcaagtacttgtattgatatgacagctgtggaactcaatggagggcagccactgtcagatgccagaatgacaagctcatggctagcacttgcttctctgtccagactgtgaagcaacacaagataaccgacttgcttataaggatattctgaatgaaagaacttagtttccacatgaaaattgttctgtgaattaccactgatgatggaatattcaacatatgtgttttcacgggtccagtcatggtcgatgtttgaaaatgtaacaagcgtgcttccaaccagagcatcctcacttaggctaagattataggatttgactgtgaattcaggggcataattgttcatatcttctattcctatctccactaaagtaagagctctcaggtcaggatttccaccatcactggcttccacaagaaattgagttgttgatattgtatccagaagtaatacgggactgatagtaaatattgtgcctgaaaaataagacatagtatttcaacactgtgaggtgcagttttgatgatccatttaatcggcagttgactatccaatgtctactaatatgtgtttaattctttgttagatctgttaagtcacaatgaacaatgactccaaatagaaatacaaattattgtatttatatgtttataacatgtaagatacagaaataatattcatgacattcactctgtgaaatatgtgtgctgcttgaggttgctgttgccacaaattcctctgaattttgtttttgtatagtaagttgttccactattcttaaaaaatatttttgtttgtaaaatttataccccattctactacccacaaacacatgtataaagatattctggcataaagatacttattctggaaatacttgttgatattcaagccaaatgaaagcagtaaaaatgataatgctgagttactattatactattgcttaattagagagatgggctttcctacagatcatgcaagtcgatgtttcccttattgctgaaatgtagttgataaagtttattgtactaaatatagaaatatttaatttttataaatgtgtgtgttaaaccatttttaagataaatatgtcttaaggatggtcactaagaaagaatacagaatgctgacatttaaatgccatgtttcagttagagtcccaccatgaactaaatcggccatcatttaatgttttaaaaatatttgaatcaatagcttagtgcgtttaatgttttaaacattgcatttaatgtttttaacattgcctttaatgttttaaacatttaatgttttaaaaatatttgaatcaatagctcagtgcaaaatctgtcaatagcacatgtcaagtaaaagtgttgctaaggattgagtgctcagaagaactgccttgcacactgtgatttgctgtggccggggtggcagttgccatcatctgagactacagaaagagagacagacagagagagaaaagacggtgggggggtggggtggggatacagagagaagaatagaagagccaaattcctgatacgtttgtaatcatgcagtaatcgttcatccacaggcagcatgatacaggacgtacttctccatttacaacacccggtgggcttcatgctggtattttgggactaaattcccctttcaggtaatcccaaggttaatttttaaatgaactctcacttgtgaaatgatgcaatggtggatagagatggggaacacagagtgtgatgtctcccaggccctgttattttctagtatgctctgctagggacattgttttgctacttattcatctttacaaaatttagcttttaaattaaattaaatgtccactcactgttcaactttctctatatactgtttaattgaatgtagaatcacttgcctgaaggcatttcacaaccacgaatgtcttggtctctgataaaaagacaaaaagccttgggaagcatcaaataaaccaaaacaccacagtggtttccagttggtagagatgcttaaataattttccttttaaaattattcttgtgcttattgaacatataatgctattactgattttttttaacttggcttgggaagaaagcatccagactctagtaatatgaagtcttcagcactaacttaatcccttcaacatcattttgattcttgctgaatcctgggataattgcctgaactgtgcttggttggacggatgcaactgggtgtttattatactggggtctctgaatttgtgagcatttaccagcatttaaacagtgacatttgctttccagccactgagatgttggagaagagaaataacactggcatttgctatcgcagcacttcatgtgaagagtaatgaaacagtcgtgcttataattccatgcggggtggggaggtggggaacttttatagaggcatttagaaagggttatttcaggtttctactttgaaacccaaacctatgagcattaatgcaattataaataactcaccattcttaggatcaatggagaattccttagaagaggatagaattctgtaagaaatgttctcattgctttctaagtctgtggctgacagagtcagcactgaataccccacaggtattgattcaggaactgtgacctgagggaaaaagagaaaaatagggacattgtgcttaaaggctgaaggtattttcaccaacagggacagaacatgaggtcattttattcattttgattatggaaaccatacaatacaacctgactttgttagacatattaatttatggaattggcatattaaaaagattgtgtgaatagtccctggattcagaaaaaaaggtgttgttttgttttgttttgtttgagatgcagtcttgctctgttgcccaggctggagtgcagtggcgcagtcttagctcactgcatcctctgcctcctgggttcaagcgattctcctgcctcagcctccagagtagctgggactacaggtacctatcaccacaccaggctaatttttgtatttttagtagagatggggtttcaccacgttggccaggctggtcttgaactcctgatctcaggtgatccgcccacctcagcctcccaaagtgctgggattacaggtatgagccaccacgcctggccagaaaaactaagttttaaaaataattttattcagttttttttactatgaaaaaaagttcttctaaactatttctatgaggcagaaaatagttaatacattcactaatatattattccattacatgcatggcattaattcaagcaagccttcacaggggatcattacttaggttaccctccccttgtgtttacacttaaatcttgcatttgctacattcaaaagttctggagtccatttgcaagtattgagttgaatgctatccttgcccttacttctataaacatatattatgctctaaaagctaaaatttccactttatagttttgttcgtgattttttttctgtaaaattttaatcaatgcattccaaaaatatgcctatgaaagaaagaattttcccaaattaactgcagataatgcaaacagtcttatcagtggtttgcaaatatttggcaggttccaattgtcatgacaaactggactacaacctctaaaaactaaaaaaaaaaaaaaatacatatgtagtaaactaaaccgaatgagacattcatttccatatgtacttatagactccgtgatattaagtgtaaaacccgcagcgttaacttaggcactacaaacagtgaatgctgtctatctgaattagtctatcggcgatggaagacttacattattctctattctttctagttttggctttggtttcggcatctctttaagccctttacctgatagaaatcttgagaaaacactggtggattatcattgacatccagcacacggactacaagtgctccctctgtgtagtgcactgaatcagaaatttggatgagcagctcatattcagtcatttcttcaaaatccaatgttttcaccaacaccaccactccagtgttctgatcaatagcaaacttggttccaggattactctctttggcaaaactgaatatgaaagctgaattcaaatccacatcatgaactgacacatgagtcacaattacaccaggcaaagaatctgaaatagtcatgaccagtgtcagtctccattaaaattcatcctttgaaatacatttctttagtagttccatccaagtatttttattctaagtccaatatgatttgctctttcttggcttgatttctcatacaaagctcattatgcactgaacaaaaactctgaagaatttatgagaccaataaaagtgaaaatttaccactgagtagggaattgaggaggtagggtatattcaatttttatattacattattttcattatatgcttacaacacaattccagtaccaagaaacattctaagccacttatttataatatacactttctgtatcaaaatcatatcttcatgggggatatgaatgggatgaaaggtattactcaggacattaatacaaaacatggcattttcaaaaacaggccaggtttaaatatttgggcactaatgtccgaattagatacttatttccttatatttatttttgtacaattatttattttggagtggtgcacacactgcttccttttcttaaatctgactctcaaaattattaagactatagaaaaacaaagtctacatagtactagtgaggaaagcaaatctcaaatattattcaccaaaaaattacaaaatagatgaaatgttcaatgcctcactcaccacatatgttctgtagcctaaacagcccgtgaaagggactttgtttttaatcttacagatatggtacagctagaaagaatatgccaagatgctcagaatagttccattgtatatgaaacccataattttccattttcaagcttgaacactctcaatgtgcaccaaccacaccgtaccctattcagtatgttttgatttatgtagtttcttcttgtgatatatttatattaggcccattgctatattttaacactaattgcatgtgctgaaaaatagatccttcaataaaatcaaatgaaaatatatcaaatatgcaaaaggcaaaactggagaatttattttatttgtaggttgtaatatttgtagatatctctatgcatagacatgtctggaatatttccctctgtgagaggttatggttgtaatttgtttagaaagtgaacataataaaatgttagaaacattttaggaattaatgtcgtattacgagtgaagtagagaggcaagcgagggtcaccattattttcatcttcaactataaagacttaggttatgtttccccaacgcagccattgaccatggacaactttgggtccacagactagaggaccattgtataacccacagacccaaataatgaaggttaaccagcatctcacttaaaaatttctagtttcaacctctaccattagtgtggtacaaacgttgaagataaggttattctgggaaaaatgatggctttgtgcaataaacatctaattcacttcactaattagttgttgttcgtatcctgaaaagactgacagagttatgaatgctgattcttcttagaggaggttcacaatggttatcacagtcaacaaaatatgcttcttcatagagtagatataatttgtaggaaatgtctgcattataaacagatactataagggatgatggttggagcatggggacttgctttgacattttactcctttgacatttaatatttaacttatgatcatccatttttttgttctgcaaaatgaagacaaaaatgatctagtttgcttggttgttgaggattagcactcatgttaatacagtgtctggctaaagaaaatggtaaatgatattatacaagttaatcaaaaccactatgccaaattgtcacacttaccttctgtaatttccactgcttcagaggggagaaaagctggggcattgtcatttatatcagtcacctgtaccttgattacagtcgtattagaaagcctgggcatccctttatctgtggcttggacaatcaagctggtttggaaaaagaatcaaagaatgtgattcatcatccaggaattagaaaaacaacataaatatcaaatatctagttgaaaattttaaaatgagctgactagctacttttatttttctcttggattttctaaatggcatcatttaaaatgtatttcataagaatggtactctgaaatttatttatttttggcatgttcagagaaccaaatccagcaagctgccagggatcatgaggcattaatgtcaaaatggaccatttcggagagccagactgtaaaattcaatcctgtcctgtgaagaataatcttaaaaaatagaaacaccaatatctgtactttggataagtagactgtttccaccttgccatgccctggtctggatattgctacatatttccatcttactgaaccaacaaaagatgtagccactaaaagattgctttgtactgatatttttggatccaaatagcaaatcaatcgaaatgctagaaataagacaggacaccgctatgatgaacacacttacagaagatgtatgattggctaggattgtgaagtagaggtaaaagtccatgatctgaaagaatttacatagactaatttaatctctcttggatgatgctacaatgagcttgtccatcaaacaaactacaaaccttgttactgtcttcaacttctccctttctctcaccacccttccaatgttcaactaattatgtatcttatcggtattacctcctggatgtcacttggattagtgtccccagccatttcactcctaccttcagagccctcatgtatggtaatcagcacattttgctttgtctgggagtgaagaatttcctgggacatgagacttgcagtgtttttaaaaccaagatactccaggcaaactggacatgggactttcagtgctacatccactaaagtcccaggcaaacctggacaagccagtcccctgtagcctcagcccctcaccatttttacctggaatgctctatatgtattgtatcctttctcaccaggaggacctgataaattaccaacctccctgctgtgagtctcctcttgttccatccaccctctatattgcgctcaattgctctaactaagatcctaatttgaaaacctgacctccctatttaaaactcttctttggctctccatgtctctaagaggttatccaaacccctgaacatgttcacataaacttttttgttcttgcttttacatggaatctcagcccttacaccttggtttttcaaagctcacatctctgcgaagttgtcatggacctttcatttgatttaaatgcacctttatgtattcgcatagcaccctgtacattcttctgccatagcaatcatcactcttttttcttaataacatatttgtctgcctcttctgtaagtttcttatgggcagggagccgccttatttgcttttctatagtaagtattgaatgttggtttctcaagatttccccaaggttatacatacattatatgacagagctgggattcaggttcatgtgttggtcaactggaaacctgtgcttcatgatacttgttgaacatacctctcttattgtgtatatatcacattctaatgtataattattggcttatttttcactcccctctgaacacgatgaaggctaggagggtggctgagtaataaaatgagttattaattagaagatgctctttatttcagaagtggaattagtctcagctagttgtgggaaccaccttttaagaaactatgtcttcaaagttgatacactttcactttgttttcattgttagaacattcacttgatgaatgttctttctctttccaatcctaaatttaaaaatgacatgaaataaacatcaactccttcttggtttgaattccacttaatattaaatcatcagggcttatctactattcatgaagaacacaggctgccttctgcattatcagagttggaatattagtagaacaaccacctgaatctcacatttctggagcctaacttctggaataattatatgctgaaagtttattttgttagtatgaatgtcagtcagatacatatggaaatattttaccaaaaataatcaactcatactcctttctcccctgctgcttgccccttccaatgtcatctaaagtctcagccaagacatcaaagttaagtttctatcaactcttctactgtagccataattaccattattttcacaatgttacaacttcaggcatcctacataatgccttgtcagattaaaaagaagtgagattctttgatatggagagaaatatgttgtttagcatcaaaataaatgggaaaggaaaaggttcctcaatgacttgaagaacaaataaaaaaatatgaaggtagatgtgcagatattctgtacacaacctctgcaagacttcaagccatctatgatggctctttcgcagttgtgaaactgttggttgtagcctgtccaactcactccatgttccacaactgttgccctgattactattatcactacagacaataaatgaaactgaccagatttagaacaggcccattctaagccttttaaattcagagcatttttttcctgttctatcaacaatgggaagcttcttttaccatgttaaactttaaataaggcttttgaccaggaaggatctctttgattgtcttaacaagtactaaacttgttggtagaggatttttcaaaactctcaattatatcttaaacgtctagcaggaattttctaatccttctgaaattctgaaaaaaaaaatatcagccaccagtagaaataactatgaaaagaaaaactatgatttctggttaaagacagcaagctgactacacaggttttatcttcccttcctctcaagattcttctaaaatgatatcaaaaaccttttataataagttataagtccataaagctaaaaaatgagggaagatattagtgggtgaaatgaatgagaaatatcaacaaattctggaagatacaagcagattgaagagtgtttgcagatgagtgggccaaaggaaatcagagattaaaatccactcagaatgtacaacaccaagagtggatcccactgaaaactgtaaatctgagtgataatgatgtgtcagtgtagcttcatcaaaatgcaccaatctggtggggattttgataacaggggaggctgtgcatgtgtttgggcagggatatacaggaaatctctgcaccatctctcaattttgctgtggacctaaaaccactctaaaagaagtcttttaaaatgcattcagaggagcataaagatacgtgaggagcagagttgctcccaggtcaccaaggagaggctcaagacatggcaaatattgcagtgaggtattgagataaaaataggaagaatattttaaattcagattatttaaatagaaagattatttatgttattttaaatacagggtagttttgtccctcttgcccattactctgcattctcagccaaagaatgcctttggttcatacttggggttagtaatattgaaagaccttctctggagaactgaaagtcccctcccaaagaaaagtgaactccatatactgccatttgtatgtcatcctgaaaaatagtcgacttcccctgtggtacatttgaaagtgaagagtgctagtcaagtccctctagcccactcagaggttctaatgactttgaaattgcctcacttatatctaagaatcaacacttatttacagaaagccttcagcatgaaaaagagagctcaatatagacaaataaaaaaaaggaacccagtggaaacagatattgaaaggaacaaaagaaaatttaaaacaattctaattaataccttggagagatatcagaagacaacatgtgcataaaacaagagttggatattatttaaaaagtcaaacatcaaagaagagcttttagaagtaaaaacaaatatataatatcctctcaatttttaattagaaaataaaaaagaaattttagaagattaaaattcaggaaatatcttcccaaaataaaacaacaaaaactaaacccacacacaaacaataaatggaaagtaggaaataaaatataactaacaaagaattcatctaggcaatccaatacctaattgaataggattcaggaaaatgaaacagggcaaaacaacaaaacaaaactaaaaaaaggggaggaaattttcaatgaattttccttttcaataatacaagaaaattaaaagaaatatgtctttttattaaaagtgaacactgaatacacagcacaaggagaaacccacatcaaaatatgcaatcacattttaaaatactatggatgataagtataacctataaatttctagagagaaggaaaaattatacaaagtaaaagaatcagaatggtggccaggcgcagtggcttatgcctttaatcccagcactttgggaggctgaggcgggtggatcataataaggtcaggagttcgagaccagcctggccaatttggtgaaaccccatctctactaaaaatataaaaattagctgggtgtggtagcgggcgcctgtagtcccagctactcgggaggctgaggtaggaaagtcacttgaaccaggaggcagaggttgcactgagctaaggtcaggagttcgagaccagcctggccaatttggtgaaaccccatctctactaaaaatataaaaattagctgggtgtggtagtgggtgcctgtagtcccagctacttgagaggctgaggcaggaaagtcgcttgaacctgggaggcagaggttgcactgagccaagatcacaccactccagcctgggtgaagagcaagactccgtctcaaaaaaaaaaaaaaaaaaaaaaaaaaaaaaaaaaaaagaattagaatggcactagacttgttaatagcaacactgggtttcagagaataacacagcaatgccttcaaaattctaaaagatactttcaacttctgtattgtccattgcatatattacatgaaagagtagaataaagacattttcagacatgcaaaggctcagataatttacttctgtggcaccttttcctgcaaacctattggaagagaaagacatgggatctggaagtgctggcctgacctcggagagctataaaccaaagttatcggatctcagccttgcaataggtttattaacccaaactgttcatgctagatggagagggcataaagcagtaggaaccaggtcttcatgaaaaaagagggcttgatagaatatttgatgaaaggcagttagaggataaattagatgcagataacagagcttatgggatatttacaaggcattcagtgcatagatatagccaattgggcactcaggaaagaaactgggggcttgaggagtagtgataaaaggaaaaaaacatataatatgatttgactatgaagtaaacatgaatagattcatataatataaacactaattactgattaaatgaaaaacagtgatatgaatatagaaagagttggagtgtgagaaagtaaggattttacacctatatctattataacaggaagttaagagataatgtttaaagttataaattattacatacttgtatttataatatcagagaaaatcagttaatagtgtctgcttctggagggctttagccttgggagaggtgaggcagtggttgctgactttcatctacactctatacactatttgatttttttaaaaaatgtatatattactttgataataataaaaaatcaaattaagaaaatatgcttagatcaaaatctttaatctttatgtatctattgaatacttcttttctgcctaaacagactcaatcctaagtaaaaagaagaaagccggaggcaccatattacctgacttcaaactatactataaggctacagtaatgaaaatagcatggtactgatataacacaaacacacagagtgatggaacagaatagaaaacttagaaatagaaccacacacgtacaaccattcaatctttgacaaagccagcaaaaacaagcaatgaggaaagcactccctattcaataaatggtactgggataactggctaaccagatgcagaagaatgaaactagatccttaccttttaccatatacaaaaattgactgaagatgaattgaagatttaaatataaggcctcaagctatagaaatcctagaagaaaacctaagaaatacccttcttgaaattggccctggcaagaaatttttggctaagtcctcaaaagcaattgtaacaaaaaacaaaaattgacagatgggatctaattaaactaaagagcttctgcacaataaaagaaataatcagcagagtaaagagacaacctacagaatgagagaaaatattcactaactatgcatctggcaaaggtctaatatccagaatctacaaggaacttaaatcaacaagcaaaacccaaataatcccattaaaaattgggcaaaggacatgaacagacacttttcaaagaaagacacagaagcagccaacaaacatataaaaaaatgctcatgatcactaatcatcagagaaatacaaatcaaaacataatgagataccagtcagaatggctattattaaaaagtcaaaaaacaaagatgctagtgagagtgtgaagaaaagggaacattaatacattgttgggaatgtaaaatagttcggccactgtggaaagcagtttggagatttctcaaagaacttaccacagagtgccattggacccagcaatcctattgctgggtatattcccaaaggaaggtagatcattagagcaaaaaatacatgcatttatatgttcatcaccacgctattcacaatagcaaaaaggcaacctaggtgcctgttaatggtggattggataaggaaaatgtgatctatgcagccataaaaaagaataaaatcatgtcttttgcagaaacatggatagagatggaggctataatcctaaacaaattaacacataaacaaaaaaccaaaatagctcatgttctcacttacaaatgggagctaaacatggagcatgcatggacataaacatgggaataatggacactgtgaactgctgagggggagggagggagggtgcatgggttgaaaaactacctgagtactgtgctcactacatagtacaacacacctatgtaacaaacctgcacacatgtctcctgtaactaaaataaaatttgaaattaaaataaataaataaaaataaactatatgagaggattgcataggtaatatgcaaatactatgccattttatataagaaatgtgagcatccatggatttttggatgggggagtgggagggatgcagtggagagtctcacaaccaatacctcatggatactgagagatgactgtatttttagtgattctaatgcaaacatattttgaagtcttctttcagcccaacctctccccttggtctccatgacattatctttttctagatctttctattccctaaatatattttgcagttcctatttatcggccgaatcctgaggtggtgataagtcaccactcctcaattctcattttacatattctccctaggtaattcattttacacattttccctggatgaatctcaaatccatatcttgagtgaagacccctaccctgagctacagattattattttcaattgccaaaagggtatctttacttttgttcttgtattggtccttccacctcaaaatacccagaataaaaaaatcataatctccatctgttcctctcccttcctttcctaagcagaaaaagaaccattctatctcttttcttgctcgataaattcaattggtgatcaagttcctatggattccatatttgaatcaatattttagtatgtatcttccttctgtccccactgcaccatccatgtaacagacttttcattgctgcagtctagctcagcttgttggcctaagctagttctctctcttgcagtgcatccattatgaggtgtctttagaaataaagatacaaacattcgttcaactgcttatagttgtatgtagttcacagaataatgtttagtttccactacgagacacagaaagtctttcaaaacttgcctgctgcctctttcattaccccaaacttagttgcttctttggtgtgctgtactacttgctacttccaaacataccaaacactttcacgttcccgtgcctttggccccaaatcctttttattccctttttctcagggcatcaatagactgggattccaatcccagctttgcttttcatgaattgtgtattttgaaaaagataattaacatctcagtccatttcctacgttgcctgtaaaattgctttctcccagtcataatgagcattcaatggagaatacactgagtttagcattgctcctgaaaataactgcttgccttgaatatttatttattttgtaaatgtacatgcatatacttttaagattcattcacatcataaaataagccctgcaatcattcacatcggctagaatcatgttctaccatgtactagcttcggattcttggccaaaccactttacctctctgagttcccatttctttattttataaatcatgtctattacaagaattcaattagataataaatgtgaagcaggagttccataaatggaaactattgtgattattaatgtgccttctgccatatatcttactaggacttgattttctttttctttttttgagacaaagtctcactcttgttgcccaggctggagtgcagtggtgcgatctcagctcactgcaatctccaccttccgggttcaagcgattctcctgcctcagcctcccgagtagctgggattacaggagcccgccaccatgcctggctaatttttgaacttttagttgagacggggttttgccatgttgaccaggctggtctcaaacgcctgacctcaggtgatctgcccgcctcagcctcccaaagtgctaggattacaggcatgagccactgcacctggccaggactcgattttcaaactccttgagaacaagggctcttgcatttgtctttgtgtccccagcttcatgcttgataaatagctttttgtatattcataaacatcaaacagaaattaatgcctattttataatttgtcatcgaatttccactgaattttcttctatgtggcttaatatgaaaactaaaaattatttaatacattcatatttagtagaatcatgactgatactatctccctttttccattttatgttttaatttattattattttaaaaaatgcatcactaattaaaggttaaattgcccaagtcttggaaattgaagaatataataggaaatcttttctttttcaatttttaatttttgtgggtacatagtaggtgtatacatttatgggttacatgagatattttgatacaggcatgcaatgtgtatcaattacatcagggtaaatggagtatccatcacctcaagcatttatcctttgtgttacaaacaatccaaatcttttagttatttttaattataatctttttgttatttttaaacgtataattaaatttttgactatagttacccttttgtaccagcaaatactgggtcttattcattcattccaactatattttgtaatctttaaccattcccacttgccctcaatcctccctgacccttcccagcctctggtaaccatccttctactccctatctgcttgagttcatttgttgtaatttttagctcccacaaataagtgagaacatgtgatgtttgtatttcacttaacataatgacttccagttccatccatgttgttgcaaatgaccggatctcattcttctttttttcttttaatggctaaataatactccattgtgtatatgtatcccattttctttatccattcacctgttaatggacacttaggttgcttccaaacctcggctattgtgaatattactgcaataaattgtcgatatagtgatttctttttagtgggtatacatctaggagcaggaatgctagattgtatggtagctctatttttttgaggaaatgttttatattttaaaacaaagggctggaattgggatactttcctcgatcagacaaaatagcaatacttcaaaagtaaaaagttggaagctaaatgagactgtttccagaacattcactaaaggtgtagcagactagggaaaatcctcctttatttcttattgccttaaatatcaagaaaagcactaaaggatagaagccatgccacagcaggtgttgtgcggggtggggggcggggtgtggggagagcccagggaggaaggaggtttaaaataattccttgccttggtgatgctggagagagagagagagagagagagtgtgtgtgtgtgtgtgttgttacctgtgtgtatctctctgtggcagtgtgtagggggttcaacttttctcagttcctgcttcttcaagcctagagttaaattcttcatggcaatgggagagagtcatttttaatattgggaccaatttaatattgtgaacatagaaaccatgacgcaaataggaaaaagttgaaagaaattagatttaattgttaattaggttccattgagtaagaagaacactgtaacagaaagtccttaaaatcagaaaatgcttagttcttagaacatggcagacctttaataattcctgaatttgtaatcactcaattagattgagatttatctgcagtcatccgtggaagaggagaaaagtttcatgcttaaacaattactatagaaacaatgtagcagggaataggttttaatatatctaaacaataagtaccaatagctattatgctaaaatattattttaaaatttataatagttaatacaggataaagtcttaaacttttaaaatacttttgaagtatattaaacaaaaaactaaacatttaaatttttagcattgggaggttttccagagggtaattaatccaatatagccagtaagatattccagtttaatcagctctcattgctcaaccacatgcacatattataattttttcataaaacataaaagtagtctggtgtagaagcatactgacactcactgtctttggtatactgtacctgtgttttccttaaacaggatgtctgctctgcagctctacagtggaaagactgtgacttagaagcagaatacttaagtgcaagttcacttttgaacctcaaattatcctatgaccctgagcaagccactgtatttctgttgccttatcagcaaataagaaaatgcccaccttaacatcctcaggaggtgcttgcgaggattaaatagaatacagtatgagcaaggccttttggaaaaaccgaaaaacacaacatctatctaaagcatactaaaatgttcagtaaaagagctaagcctctcttggaccacaggctgcctgactgcttctccagagacaaataaggtgaacggtttcttatattttcttccagaagcattctcaatatgcgggtgtgcttttactcaaacaggcatgctggataagcatggtagtgggtctcgttactgccttcacttagtcacatatcctagagctccatcctcatcggcacatagagttatgcctctttcttttgtaaaatcagcttcatggtatttcatagtattctattccagggttttgctaattctttaagcagtccccactcatggatattttagaattcttaacagtgttttgctggctgggcgcagtggctcaagcctgtaatcccagcactttgggaggccaaggcaggtggatcactagaggtcaggagattgagaccagcctggccaatatggtggaaccccatctctactaaaaatacaaaaattaaccacgcatggtggcaggtggctgtaaacccagccacttggaaggctgaggcaggagaattgcttgaatccaggagacagaagctgcagtgaactgagattgtgccactacactccagtctgggcgacagaataagactctgtctcagaaaaggaaaaaaaaaaggcttttgcttccacaaattgtgatcccatcactatctctctgtataagtctagtctttggtagcactgatttttttaaacaccaagaaaacttaaacactattattatttcctttgttgaattctgtataaggctggcatatcttagactctaggcacaaagttttaatgttaaatgtatgcgtttaataagatcatttctattagaacacagaactgcaacaggaccttcaagacagcgttgtactttcatatgcaagaataaagaatcaaaaagcaaggtatccctcagtcgtcacgttttaaaaaaacaataacaacaaacacctgcagagggctctctagttcattagacatctcacaaacattatctttttagtgtcccccatttagtgcttaatagcatcacaaattcataaaatcttagaactagaagggaccttaaagttttgctattttaatcacttttttccaaatacaaataatggctgagactattttcaatatcaaaaagagtagatcaaagagaatatcaacaagttggatcaaagggataacacattttacaataagcttacgtaacaggaagttatgaacaaaacagcaatgttgtcagtaagcaggcagaataaatggagccaatggatctgaaccctggaccaacctgtaggagctggtgagctcgtaatctagaatcgcttttgttgttatcacaccactcagtgcatcaatctggaatgcttcttcttggttgccagacagaatagaatactcaatcaggccgttcaaaccactgtccaagtcggtagcaaaaacctgtgaggaaccgactgtttcattagataagatttattctgcaatatgggttcagtctgtttttcagagacatgcattaagaaagaatcacagcttgtcaaacatattttaaaaacaacgatgaaatgaaataccaacagacaactgaagcttacatttaactttatgataaactgagtgatgggggaaattcttcatccaaagaattttcaaatagctctcagtagacatggtacatgtttttgaggtataattttgtgcaatgagaagaaatatttttaaaaacatctaagttgcttgaataggagagttccaatagtgtatatgaattcatgctagcacaagtaaagggaaaaaatgttatgggaaatctccacatagtgataatttttttttcatttgctctgtttttctgcttaaagaattacctataaaattggctaggtgtgaatttttttatattgtatttaaagttttattttattttatttttgagatagagtctggcactgtcacccagggtggagtgcagtgatgtgattcatggttcactgcagcctcagcctgctgggcttaagtgatcctcccactttagcctcccaagtagcatgcgccaccatgcccagctaatttttgtatttttttgtagagatggggttttcccattttgcccaggctggtcttgaactcctgggctcaagcgatccacctgcatcagcctcccaaagtgctgggataacaggtgtgagccactgtggctggccctaaagtttcattttaaagggatcattaaacaagtgaaacaaaacctagatttagtgctaagaagtgtagatcctaatcatgtatttgatgagttatcaaagttgtgttgaggataaaacagaagttttacatcattctccatcattttgcaataaactttaatcactaaaccaattatgttagtggatttggtatcttgattaagaacaagttgacaaattaattaattactttttacttgtttatatcttctatgcccctgagccttagtcttagctcctgtcccctgtcatctctctcctgggctactatactgatgaatgtcctagtgggttttcattctaatttcctaccatctcaatttatccttcactttgctgccagagttctcaggggaccctgagtgacccaggtgcagtatccaggagctcatcagacaggggacagctcttgggaccgaaaggctgcaatatgcagtttcctttgggatcaccaagaaaagaaaccagtctgcatcaaagtccactatatcccttggagccatacatttaaaagtgctacagaagcactttgggaggccaaggcgggtggattacgaggttaagagatcaagaccatcctggccaacatggtgaaaccccatctccactaaaaatacaaaaattagctgggcgtggtggcatacgcccatagtcccagctactcaggaggctgaggcaggagaattgcttgtacctgggaggcggaggttgcagtgagccgagatcacgcccccacactccagcctggcgacagagcgagacttcgtctcaaaaaaaaaagtgctacagagagtatctctgggtggtctatcagctatggttctagggtaccggcacatcttaactagtgctaacccaaccggggagagatgtatcagaaagacagtgcccagtgaatacaagagcctgagtggctctagggaatgtaaagcacagcttctttgagttgttgtcatcaagatgaattggctgtaatttgtctctgtcttggtgtcccttcaccgaagattcaaatttcagggagagaaagtctgtgtgactgagagaagcaaggcagttcaccacacctttggcgggatgggagtgggaggcaggtcaatatcttgatgacaacacccccaggactgcatcaacagagggtcagaccctcaaaggagtttgtggggctgtaaccaaaggagggcattgagcaatgtggggtcaaaaaccaggaagcaaccaccacaattggtatgagctccagagcctccttcatttctaattttctgaacaggacacagcagaatggtagtgctagcttcctgggaactcaatgattggaaaatggaaagaacaaagttcattctatctgtccctgactcagccttctacaagtctgccataatttgaagggctggtgggtcaggctctctctcattcagtgcacctgggctttatatgggtctttgccttcacttatttcacactgagcaatttagctccatcccagttagcatttgggacagagaagtgaaacgatgcagggccccagtgtggggatcctcttgtgacaaggtggcaatggaggcatctgccatccccactgatcagcctcactgggcagggatgataaagactggaaaagtgaatgttctttcttctgaaacatctcagtcatggctgaaaccagggtaaagacacagcacatctggaacaggctggtgactagagcaatcaggctgctataaaacaaaatacacctgcagtcatagcctaggggatcccagatatcctggacggggtgtaggggcacagagctaaaactccaaggcagctgagactctattggtcttgttttcaccaacagcatggatatgtgcttcagaaactggaattgcagtaaaagaaaggctttttttttttttttttttttttttgtgagattgagttttgctcttattgcccaggctggagtgcaatggcatgatctcagctcactgtaacctctgccttccaggttcaagcaattctcctgcctcagcctcccaagtagctgggactacaggtgcccaccaccacaccaggctagttttatatttttagtagagatggggtttcaccatgttggtcagactagtctcgaactcctgacctcaggtgatccacctgccttggcctcccaaagtgctgggattacagttgtgagccactgtggggtctttttatataatgaggtgaaggtgtctgcacagtaaagaactgttgcaggttttgtccagaaaatatgctagcatgccatgtaaacgccttaccccacctagcccagagaaaaaggggtgtaataagcatgaagtgctgaccacagccatgacattccaggggccaaaaggaatgaccctccctgtggctaactttgcctggaagttggatttatactgatttcctttccaaagtcacgggaggttagagatctcctaatgcccagcttcctgactacaaaaactcaattcaatagtggagggaaagatgaaacaagcacttgtcctgaggcaggtggagaaagtatcaaggatgggtgggttttacagcatgaacaaaacttccctgtgaatggatgcttctccaggacttggggccttttactgagatggggctagtcctgaaagcagatccgtccacatgcctgttcaccttgaagacttagtgtaaatatccttattctatgaagtcttacactcctccttcaggaggaggctgtgtctcctcttttcactcattacactaaatgcatacttctattgtattaataaatgcatacttctagtgctcaacagtactcctagagaaagcagatgtcagtaattgagcactgaataaataaagaggaagagacagtgcaagaatttcagattttctttaacctaaggtttcatcccatctataaaatgtacatggcctggaaagagtgttgtactacagggattagaaatttttatgtacattgacttgtaataattctctctctctctctcacacagacacacccacacacacacacacacacacacacacaaatatatttctgttacctgtatgacatgagcattgtagagttggctttcagacactgatgcctggtaaatgctttgttcaaagcatggtgaattatcattctcatcctgtatcaagactgctactttgcaataggctctatgcccactactttcagctaaaacgatgagttgaacctcatttctgacttcaaaatcaagaaacttgggttctttcacagtgagttgtcctatttttatttccaaggagaaaaaaaagaaaatgatgttgtagttattcttttattttttattttatttatttatttagttttgagacagagtctcgcactgtcgcccaggctggagtgcagtggtgaaatctcggctcactgcaacctacgcctcccgggttcaagcgattctcctgcctcagcctcctgagtagttggagttacaggaacccgccaccatgcccagccaattttttgtatttttagtagagacgggttttcaccatgttggccagtctggtctcgaactcctgacctcgtgattcacctgccttggcctctgaaagtgctcggattataggcgtgagccacagcacctggccatagttattcttaaaatgactcaaagcatctttgcctcatgtgctcacagctcacctgtcccgcaaaagcctcccattgccgggcctcctttccccaccgacccgggtcattgtgaaaagatttgggatcttgcagatgtttgcaggttcaaatatgtagagagaaagaaactatgaaataccaagacctgggagctatctctctccatatttaccccctggccatgtctggaaagtctatctttcaaatttagcttcactccagccccattactgctgccttccttcaagccaccagcacttcccaccttgtcccctgcattagccacaaaattggtctctccctaatccagttttcattctgaatttaataaaaaaaaagatgctgtcattgttctgcatgaaacccttccatgatcataatatgcatctgcttcttgaatgcttattaaagagtcatcacgcatgcggttccatcagcctggaatggctcacacagcgattcttcctcagggatttttccagatcaccatccctgtaccatcacctccccaaagtctcttacaaagcctctgcatttcccagcagctgcatcatcgctttgttcaccttcatctgttttttgtcctattattcctcttgtttataagctccatacaccatctcttacgtaccatcatatctccagtgtctggctcagggtctggcctccagaaggcacacagtaatacttttatgccctcatataaaaggcagatccaggttagggaagcagatttttgagggtgatgccatactctagtttcccccacccccagcaaattaagaaacttactcctttaacataatttccttgtctagattttactgttttttcctccactttacaataaaatttccgactcaatgtattatttttatttacttggctttcactgtcagcaagtccatcaaatagagagtttctgaatgaacactaatttggagttagagaaacctgaaaccaggcataaatccgaggcctagaaatttaatttaggtcaattacctggctccaccacctcctaactttgtgacctggataagttatgcggttgacataaagctgagtctccttttctatataaaatgggatgttaacaatgacttcaaagagtggctgtgaggagcaagtgacataacgcatatttggaatgtctctttgtagtaacatgtagattccacgatgtgttactcgtgtttgtctgcccctcatcatcacatatggatttaatatctctgtgaactctgaatttagaaagagaacatttaatagccatcaactactagaagttcgatcctctggtgaaagaatctgtactggaactatgttccgtaactatggcctgggagctgcagtttttattgctctatctgaatcagcttccccagataacctagtccaagaagctttaggtcatctggcacctacttgaattctagtgggaggcatatcctgttcaaatattctgtctttgttattgggtgttttgggggagattttgtagcttatattctgttaggaaaaaaaaacaatatatattaactcactatactaccaaatttaaaatttcataaactcagtatcattttttgatatcaaatttagttatcaatttagtactagaaccaaattacttcacaaaccatagtctgttgtgaccaacacccctggcagaaaatttagagtagctctaactttgggcagctggagaataattaagatgctttttgatatgctggtgatgaaactaggtggtcttcagaaacctccctgaaacaaaggctgattcccacaccccgaaatgtcaccagagcccgagtctgaggtgggtccacagctctcacccagatctcttgtctccaccaaaaagagcacttgcctggctatcatgttctgttactgtttgtaaaggaaaaatagaatagaaatgcaacactaaattgcccgtgtcactgagtagaaagtgtgccaattatagtgcagatcaaagttgatttttaataaaaggcttgtgtttaggctttgataattggaattttgcacttggaatggatcgacggttctaatgctttccttgcatggtttttatttttggggtaataactggcatatgctgtgaaagtcgtgcaagtagaaaagacaataaccagtctgtgggatgattcaaggctgctagatccacatttttccttggataatacatgggtagttttcacaaagacatcaagcgtgtactgtcatcagtgagaggaaagtactactggactctgtctaatggtatacgcagaaactaacaccttccttagagtaagaagcctcacaaatactaacttcatgttcttgcttatatgttaatgtgccagttatggaataacttgagaaaaaaatggtagtaacattttcttctaaaaaatacatacattatgtagcttttgacaaagttatgaaatacacatccaaatgagattaagattcatcaaatgctacatgcttgataacataatcaggttacttccatcaattatatactgtgtacatgcatttgtacaaaccaaagcagaatgtgataaatatttatgttattcagtagctttcaaaccgtctcctacttaaacaatgtctttgaaacattgaaagtttgatcagttttgttttgcgccactctaataaatactaaaatgaatgctgccatctgttatttacatacaaaaccttagtcaagctctaaaattgctgctgatttagacagtgagaaatacatgtttttacactaaagtggcatgaagtttaaatacagagtcaacttggtttgtgacgatggaacagagggtaaactggcacaaattgacagaaaacagagttctcatcagagatctgtctaatgacaacttattaaactaattactaataaaatggttttctcacacttttattcttaagttactataatcttagagataaatattattgatttattatacatatcagtctcacattttaagtggtgtatgtttaaaatacatacattcagaaaacctatacaattagatacaattttaatgataatttgtcaaaggtagcataaaagatgcatttaatatcataattaaagttttaaaaaagctttcttgacagcaatatgttaaactatatacttgaccaatcttcatgataaaaacaactaaaatgcatgataaattatatatataatacatatatatgcatagacatatatgtgtatgtattacaatgcattattgagttggtacagttgtaagaattctacagaggacaaaacagaaatgaagacagaaatcctgagaggttagtaagtactaacagctcatttttgttccaaagatttctaccacaaccttttatcttactattcatttctgatagttgcatggagtgtggaaaataaggtgagaacccacaaaaggtgaaggggctaataggaaaaactagcataaagctggaaacctaaaggctgcatatattccaaatcagtggccattattgaaaaaaaaaaaaaaaagaaaactgaaactgaagcagaattagcaatgtggacataactgaaatttgctgaagtgtttcaaattgtgtagatattaaagaacaaactcatgaatacaatccacagatggaatgcagcatcaaagtcacccatatgatcacagaaggattacaatctgcagcaacggtgatgagttagaaagaaagagactacaacttctaattacaatgttcttccaaaaggttttggccaaaaaaccaccagaagcttgacttttttttttaaccttggtgttgattgaaagggagaaaaaaaatcttccgtattagtttaagcctgaatttatggtagctatactatcatagttatacatatttaaaactcttaggaattaaacttaaactggcttctccctgatgattctccaggtgaattgcagaaaaggaagcaaatcctcttttaagggcataaattcaactgaggcttcagagaatcgtcaaagagctttcaaggataatgagtagctcatagtctacaagcactaaagtcatagagaagcaaggcaccataaatgacagcaagcaaacccatagacaacagaaccaaacatcaaaggcttcagatgcaggaattgttggacacagaattattatatatgtttaaatacattaaaaacccttggaaatatgagcaaggaacaagaggctatttttcaaaagacaaagagttgaaaaaaattcaacagaactactggaaatgaaaaatacagttcctcagaatgaagagaaagacagatgaaaaatataaaaaagagatgtagcagagagtcacatagcccaacatttgtctaattggagttccaagaaaagatacaaatgaatggcgtttagatcaacagctagcttcttaatgcgacaatgggatgccagaagccagtagaataatatcttaatatgatgagataaaataactgtgaatctagaattacaagaccagcaaaagtattttaaaagcatggattaaataagtacatttttaactacctaaatctgagagagcttactatacaaaccctcactaaaggagatagttcaagcagaaaaaaataatactagaagaaaggctgagatgtaagaaagaatggttagcagagacatcaacaaggatgcagctaaatcaactgaaaaatactaataatgcctaatttgaaagaaccaaaattgtggtcacaaaagcatgtaaattgatataggagcacttcgagatcagtaattgcaaatctcttgtattactcaggaagagaatattgattaatgttggactttatatatgttaaagtaacgaggctagccaccgaaataagaaaaataactatataacttcagacaggggaaagtggtcattttcagatatgattttatgtgtcaaatatacagaaaaatgtcagtctctagtttgcaaatttgccagacaaaaaatcaaaagacaaaaatcagtttcaaatacatacaccagcaccgtcaggaaaagcattttttttcatttaccgtagtgagaaaaagcataatgtacttaggagaaatctaacaagagacatacaagcctgtacatttcattctttgctatttctctttaacatgtaatggtttatgcactgtaagtcatagtaaaaatgttgagcaaaggaataaagtcatagaagagtacgtagcatgattctattatcatacttaagtcaaggtaaaagtaaatgacatattgtttagaaattcaaatgcagtggaaaaattataaccaaaaatgtcagcgatcagttgggtgcagtggctcatgcctataatcccagaacttcaggaggccaaggcaaggagattgctcgagttcaggagtttgaggccagcctgggcaacaaagtgagaacctgtctttctttacgagaaaaaaagaagccagtgatcaatacaaattcaagttactaattatctctgggacaaaaaagagagacataaagtgatgtgtatgttaattggctcaatttagatattctgcaatgtacacatatttctgaacaacaaaaaaaaaagagaaaggaaaaaagagatataaaaaggaaggggcacacagaggctttcaaaaattcgaaaattctagtacagtagttcccccttccctgtgggggatatattctgagaccccccagtgaatgtttgaaactgtggatggtaccaaaccctatatatactatgcttttttctatatatgcatacctatgatggagtttaatttctaaattaggcacagtaagaaattaacaacgactaataaaattgaacaattatactgtagtaaaagttacgtgaatgtggtctctcttgcaaaatatcgtattgtactgtattcatccttcttcttgtgatgatgtgagatgacaaaatgcccacatgataaggtaaagtgaggtaaatgacatgggcactgtgacatagcagtaggctactactgaatgtctgatggtatgtcaggagaaggatcatcatctgcttcaagtggtcctggatcaacgagccacgatgatgtcgatggttggatgtcaagagcagatgatgttgatggttgggagtacttgagagttgcaggggttttttttttgttgtttgtttgtttgtttgtttttccaaaaccttttggaaatcattgtaataaaagcttcgcctgtaatcccagaactttgggagggtgaagcgggtggatcacgaggacaggagatcgagaccatcctggctaacacagtgaaaccccgtctctaaaaaaattacaaaaaattacctgggtgtggtggcgcatgcctgtagtcctagctacttgggaggctgatgcaggagaatcgcttgaacccaggaggtggaggtggcagagaaccgagatcatgccactgcacttcagcctgggcaacagagcaaggctccgtctcaaaaaaaaaaaaaaaagaaagcttgtcagtttttaatcaaagtgttggtacagaggttataatcctgtgatcatatgggtgacttcaatgctgcactttatctgaggattgtattctataattttgtcttttcatatctgtgtgattggaaacacttgagcaaatttcagtaatgtctacattgttcgttctgctttagtttcttctttgtcttccctttctctgtagatgactcaaaaatttcttcctcatttattaacaattctcattggccttcaatatgttcttctacttcttcatcaagcatgtcggcaaacccttctccaccaacttgtcttgctgtgtgaattattttcctaacttttccgtcaatccccaggaagccattaaaatcattcatgacttcactctagaagttcttccagcaggcatttacagtttctggttttaattcatgcatggcagctttgatgaatgttactgcgacagcaacagtgaatgatttccagcattacattacatccagattatgatctgcatcaatcaattagtggctgatcaaataccaggcaggtgtgtgaccttgataactcaaataccaggcaggtgtgtgaccttgataaaccaaatgatgcctgctcaaggggctgaagcaatgaggttttatttggaggtaaaaatacaacctcaacattttcattttcatagcaagatggccaggtgcattgtctaatattaacagaactttgaattccaacctttcctcatccaagtatttttttttttaacttctggaatgaagcactggtggaaccattccataaacaagatgtgtgtcacccatgctttattattatgttgccagaacataggcagataattttttgtttcagagagcatgtgggttcttcactttgtatactacacttgattttatcatatgtcctgcagtgttgccacatagtaccagagttcatctgtccctccatgttttatgccctggtgcttcctttgtacatctatgaatgtaggttccattgggcatcttcttcccgaagcctagctttacggcaattagagatttgctttagatggtttcctttctccttattcaacatcttcagaaatgcggcagcaccttctttgttggcagatgcagcctctccagtagtttttgtatttttcagtccaaacctatttccaaatctgtgtaaccatctcttacttgcagtaaatggcttagggtcactcgtttcaggggattccttgctgaagccttcatagagggctcaatgctttctgttgcaacatgttactgtcaaattgaacacgtttttctattcaagtcttccacccccaaatttaatgccttttccattcttaactaagcatttgccatgccctgtggccatgacttttgcatcgtgaggtgccatagcaaaactagcacaaatttttttttctttcttcacaatttcacaagtagaatattcattcttactgtagatcttagcaacctcagcatacaatcttttctcttttcttattaaattgagaactttcacctttcactttcccccccccaaaaaaataacgctttaccacttctctttggcatatctaaattgccagaatccagaatactacactcgtgctttggggccattattaagttacataagagtgacatgaatataagtactgcaatatgtgacagtgaaactgagaattgagacagctactgactaatagacagggagcatgtacagtgtggagaccctggacaaaaggaggatttacttctgtgtggggcagagtaggataatgtgagatttcatcacactactcagaatagtgagaaatttaaaacatatgaattgtttatttctggaccttcccatttaacatttttgggccatggttgaccacaggtaactaagcctggagaaaaagaaactaaggataagggtgggctaccttaatgtctatttccagagatgggtggcatgtgtatgggtttttattttactattgtccattaaacagtcttacatgtttcaacataccatctggcagatatttcacaataaaattttaaaactcaatgtaaataagttatctaatcaaaaaataaagatgttcctgtgaatgacctctttggactaaccctaggaagattttatctgcattttaatgatggactgtagaagaaataagaccaggtctgggccatgttaggagtgcggtggcggagggtctggatagcctgggaaaatatgccagctatgctactcttcttcgttcctaagcattttaatctgggctgctttcccagaaccctcagacacctggactgcaagaaaattaagacttggtgatgttcacaaacgatcctttcgtgaacaggtttcctatactaccctttaatgcaacaatgggatgaagagatgaagacttctagcaggctacctcagaaaggttgctgaccaaaggctgtatggaccaaaaagtcataacaccaccctggatgaaaggacatttacctaaggaattacccgctctcaattcttcccaggtgcatgtagtatagattaaataaggtggttgtatggcaacagagacattattagaaacattcttcttgaagtttgacaacaaagcagtagatgtgtatctactacagagttgttagtgaaaaaaggtatgtttgaagtaatcaattggtattcattttaaacagtaatggtcttactgaagctaagtttaatacatgctgtgtttggaagtaatttctttaccactgtgtagaaaccttcacagctgttctttttttgttgttgtgttgttgacattcagtagcaaattacaagaatctctgatgaaaactccttacagctagatgtgttcttatttttgaattcagactcagtgtcaatgatctcactactctatctccaattttcccaaatacatgggtaaattgtaagtggaagctaatttatcttcaaaaatttgaagggcaggatagacactgtctagtttggaaatattaagaatataattcttagtgaatataaataaatagtttttgatttcccataatttttcataggctagcttaaaaaattctttcttgcttaccttttaaattacttagctctaacaatttctactttgcaaattttgcagaaataacattaaatggagcagaaaataaagctagtatagggtagagaaggattacctgacttagagcacagggaaagaactccatcttcatttccactaaaaattgaatatttcatgctgtcctgaattgagtcaggagcaaaagctttaacagtcacaatagaagtacctgtaaaaattaggtaaaaaaagaactccattaggataaaaaaatttcatggaaacacaagagaaaatactgattatttattatttgcctactatgttttcacttgttcattgattcaacaataacttattgtcttcaatgagccagatcccatgctaggtgctagggatatactagcaaacaagatagaaaagatctctgtcctcatggtggttattaacttgtgtaaggagacagacaataaaccattaaaacatacataatcatagaaaagtttcaattgtgtcaggcccttagaaagagagaaataaggttacttgatataaggtacttctttttcaggggaagcaccagactttagagaggtctggggacagtgaaggatgagaagccatagaaacagctggaagaagaggattttgggaaaaagagccaccaccacaaaggctgtgggctaggaaagggcttggttgggtaaagcacaatgagtaggggaagaagaagaaggtggagatggcaggataagcaaaggtcagattttattgtaagtgcaaagggaagtcatggaagcattttaaggagtagagtaaaatatgatttgctttttaaaaatatcatactaagtgctgtgagaacagagaagagaggggtaagaatggagcagagaggccaattaagataatactgcaatagtccaagcagaagacaatgacctaggactgtgggatgggagatggagagacatggacagattaaagacatttgacacactgccccaaaacactggaggtgggagtgggaaaggaggctatgagagcataaagaaaagaaatattccctcaaccagcttccgatctagctgtaggaaaaagcaacccaactagagagtaaccagcaacttaactgcaagacatgaattaattcaagatttgttcagatagagcaggggcaaagagataactttaagggagaaacagaaattcagttaggtataggaattggaaagacaaaagagaaggaagtcattttaagttacgggaacagactaaataccaacatgaaagaagaattagcaaggactgatagaggcaagaagacaatccttgtaattagatctagaaccaaataaggcaggagtggggaataaatttaaataggaagtataaatacagtgtgaagaagggtaagagaggtagcaagagaatgggagagcttgagagccagggagataagtgtggctttatgtcaagaatcagctaatttttctgtcaagggccagatattaattattttaggctttacaagtcacacagtcctgttgcaaatactcaaatctgctattgtagcatgaaagtagtcacagacaatgcataaccaagggagtgtggctgtgtttcaataaaactttatttaccaaaataagtggatgagcagatcctcgctttatgtgacaggaagcaatgaagaaatgcaaagttcttgaggggactgatatactaagagaagatgctgagtgcctttaaggcaaaccaggtagggcagctgtctgtatgggaagctctgtggaaaaagtcatctacagcagccggaagggtcccaagtattcatttggtccccaagttagtactttgatgtccttgtaatattttatgtcctttgctgctcatctttcccagttgtctatgtgtcaccctcttaggattgcctgccttgttttgtaaaagtatttttttacttaatcaatttcatttatgtgaaatttacatacaataatctgtacatattttaaatatagagttctatgaatcttgaaaatatatacactgtgtaatcagtatcataagcataaaatattttctatgatcagtatcatgatcatagaatatattcgacacctcaaaatgctttcttatgcccatttcagttttctctcacttttggccccagtaaatcactgatctgctttctataagtctacattagttctgcctcttaaatttcatacatttgtgaattacacaatacctgatttcttttgctcagcattttttgagaatcaagcatgttattttatgtataaaaattcatacaattgttattgcagagtaatattctattaaatggaaaaccacaatttctttttcatttacctagggatgggcatttgaattatttccagtttttggctattatgaaaaaaactgctatgaacattcatacacaagtgtgtgtgtggacccatgttttcactgatcaaggcctaaatacctacggtaagtatacatttaaccttataagaaaatgcaaaactatttttccaaagtagtatcattttacatttcttctaacaacatatgagaatggcagttgctctactaatatggtttggctttgtgtccccacccaaatctcatctcaaattgtaatcctcataatcttcacgtgtcaagggaggcaccaggtgggaggtgatgggatcatgggggcactttccccatgctgttctcatgatagtgagtgagttctcatgagatctgatggttttataaggcagttttccctgctcttgcccactgtctctcacctactgccatgtaaggcatgcctccaccccttccaccatgtttataagtttcctgaggcctccccagccatgcagaactgtgagtcaattaaacctctttcctttgtaagttacccagtcacaggtagtatctttatagcagtgtgagaacggactgataacatccacattgattggtattatcaatcttttaaattgtagccatcctagtggatatgtagtatcttacagtggttttaatttaatttatctggtgtctggtgatattgtgcatcttttcatgtgcttattggccacttcctcctctttttaatccatctttggtccttggcctcctgtttactactcacatactattcctcagaaacttcctcatagttccacttctacgctgttggtgaaaatgtaaactagtacgacgactatggaaaacagtctgcagattccttaaagaactaaaagtagatctaccatttgatccagcaatcccacttctggatatctacccagaggaaaagaagtcattatacaaaaaagatacctgtgtatgcgtgtttagggcagcacaattcacaattgcaaaaatatggaaccagcccaaatgcctatcaatcatcgagtagattaagaaaatgtgatatatatatatgcacacacaccatggaatacctctcagccataaagagaaatgaaataatggcattcacagcaacctggatggaattggagactattattctaagtgaagtaactcaggaatggaaaaccaaacattgtgtattctcattcgtatgtgggagctaagctaagaggatgcaaaggcataagaatgatacaatgaactttggggacttgggggaaaaggtggggaagtgaaggataaaagactatacaatagatactatatacactgtttgggtgacgggtgcaccaaaatctcagaaatcaccactaaataagttattcatgtaaccaaagaccatctgtttccccaaaacctactgaaataaaaacttaaatttaaaagaaacaaaaaaacaaatatgtatacatagaaaaaatattatatatatgtatattctaaaaaataaatgaaagaagcttcctcatagttcctttactggccttagtcctctgatattaggcctgtaatttatggcatctgttttacactcccaatcttgcaatgcctgtgcttcttacttaactgtcatcctgccctatacgattacacatactggtaaaagtatgcacactgtcctgattggggagagatggatagggagtaaggctataggagtctaccctgctgctgggtgcacagtaacagaggccatgtataagacagtggtaacaagtcacaagaggaaagtaagaggaaacatctaaaaggaacaggagctgacatggtgtcagagatgagtacagagcagggctcatcatcccatatgcatttgggtaaaagcaagaagcaggaacaaatgtagaggtcaaatggtggaggaggccagaaaatgtctcagacagtcactgtcagcctatcgctgtcagcagggaaaagaggcttcaggatgctgaagattctgggcttttcaagagaagctcaaaattttatatatttatttttatttgaaatctctcaatttctaagtgttggaaaataatttaatttatggggaaaaaccccactatattggttgaacaaaacacagctgtggtctgactccaattctgagttttcttgtttaccatctctgatagagaagacaaatctctcctcttttgtttctaacccttttggcacttagattgtgctactaatttgtcatctaaggacttgtactgaacatagttgaagactgatctcatctgcctgcttaaattggactaagttccatgacagcagaggagattttctatatatttgtattgtatatgttttataactctatattagttttgctttgaaaatttcatatacttgtgtatcatgtagtatctggcgtattttgctcagtgtaatttttcaggaataaaacatgttattttgtgtatcaagtttattttcttgtatgtagtagatgcttaatgagtacgggaagaaaggaggttaaaaagggagacagaggagaaaggacactgacattttctattgtgagagattagaaaaatcctggtctctgcctacaggatcactgtaagccaaaagcaattttttttaactaacttttttttcaaataactcactgctataataccatatctgatagtgagatttgcagtagttagaaaaaacaaacaaaataacaacaaaaaaaacagctactcaagatctttgctgagccatctcattgaaccctcatacacaagccccagagaccccaacttgaaacccatcttgctagaggtaataacaaaaatgacccctaaaccaagccaaattgttattttttttttctggatatgtaaaaggattttactgtaaagaacagaaaaaagaaaaggctctggaacaaatagtagttttccttagaagcctttcaatgcctaacactcaaaaatgcagtgatcactgtaaatattaaaggaaacaagtgtgatattgcctgcaaaactgaaacttcagtgaaagctcagtcaaaaaaaagggataaaacagaatttgttaaggaaaaagagcaagaaaacccaactgaatatattactctctttacaaacattatgcttaacataaactgtaacaaagtttaaaaatcatttatcaggatttccaaacggttattcttttcaagccagttaggaagaagtcatttagtgacaaagtaatggattataatcaatcatggtggaatcaagttaccacacatgttgagaactctttcaaattgcattataatctgatgcttattttattgcattttgagagacatattgttaatataaaaatgtcttagatttttggtaggaatatgcctttacagtagtacaatatgttttatccccactgctcaaagttctgtgcttccgggtacaatttatttcctaaacacaggaaattttatttcaactggcttgtcatataagtcttaaggatggcagtaagaaaagaaacagctatgccaacaaaagaaacaatcttgctgacggcctttttttcatgggttagaatgcttattatatgcccaattacaaaagaaaacatagtgactgcttgcatagaaaagaataaagatgagtacagaactgcaaagaagagttatacatggcctctctcataaaggaacaatcctatttttgttgcaaatcaaattttcataatatcaaatggaattgtagcacaaaagaatttcattcaatgaaaatacttcaaactagacactgaagtcagcaagaagctgcaaatgttttatatgttcttcctctgacaaagtccaaattggagattctcttgaaaaaagataaaataacttaagggacttgaatccttcttggcatctgcttactgtgaaaattttaaataaaagtctatctctgggcatatagatgaaacttactattcatttcacattatcaaggtagaaagggtaagctatgaaaaccaacactgtacctgcaactcgaatgagttaagtgaaacatacagaataatttaccttttacattttcaagcttttataaattttatttcaagtctgacaccgtatttaaaaagtgtgaaacatttaatgttcttggttttttcttctttacaaaaatagagttaaaaaactctgaccgctcacagcagcaatttaaaagcatacttagataactattaattaatgctatatgactgtaaaaatcaataattataaaagtatttaggtaaagtaattatgaaaacattgtatgcatagaagtgcatgagtgaataattctagagttttatgtttgttattcctaagcaatgccaacattttcttattgatgactgacttgagagaaacagattttcaaacatttggatgattctgaattatctgttatcacttaagtgtccaaccattgaaactaaacatattgcaactacttaagaaaagcctggagtgacattagcaagatggcagaatgggaaaccccagaccttgctgcacaaaggcacggacttaacaagaacatatgttccaaaaagccttcatgagaactgcaaaagcagttaagaagtcatgggacaccaggcaagctcaaaaccaagaatagtcagattgtagacattgcatttaatccccagtggacattcccctaagctagcaacagtgctagtgaaattcttttgtgctacaatcccatttgatattatgaaaatattatgaaaatttgatttgcaataaaaataggattgttcctttatgagagaggccatgtataactcttctttgcagttctgtagtcatctttattcttttctatgcaagcagtcactgtgttttcttttgtaattgggcatataataagcattctaacccataaaaaaaaggccatcagcaagattgtttcttttgttggcatagctttttcttttcttactgccactcttaagaataaacacacaacttggggcttctccactgggatggaaagagaagggtagaatatacatccaactttatagcttttgagggggctacctgtggagatggtttctgtgttaacttggctcagaatactgatggggagccagcatactttggatgcttgagggttgctgagaacaaaagagaactcagtggcttaccgcagtgccagagaatgtgaagtactgcagatagacaccagagagagcaagagactacaaagcccctcagaaagaaactggcaaacctctctaattgggtagtcacgtacataagcccagtgaagattcatccccagaaaacctttaggaggcccccagaatctgtagccaggctgattggtaaagatcttcctttgcacaaatccagtctgtaaaatctagagaggtggtgatttttttcaaatgcagaaatcacaccaaaaaaaaaaaaaaaaagacaataaggaatatggagaaacaaaaaatggctgaatcaatggaataaaacaaatctccaggtgctaacctgaagaaacagatctataaattacttaacaaagaattcagaactgagtgcagtggttcatgcctataatcccagcactttgggaggccaaggcaggtggatcacctgaggtcaggagttcaagaccagcctggccaacatggtgtaaccctgtctctaccaaaaataaaaaaattagctgggcatggtggcgggcacctgcaatcctagctactcagaaggctgaggcaggagaatcgctggaacgcaggaggcagaggctacagtgagccgagattataccactgcactccagcctgggcaacagagcaagactccatcacacacacaaaaaaaaagaatttaaaataattacacagaaactcaatgcactacaagagaacacagacaatcaaatgaaatgaggaaaactgcatgaacaaagtgagaatatcaataaagagatagaaactaatttaaaaaaacccagaaattaaggagctgaagaacaaaataactgaattgaaaaattcaccagagggatttaacagaagacttgatcaaacagaggaatcagtgaacttgaagacagatcatttggaattatcaagttagaggaacaacagcaacaataaaataatgaagaaaagtgaaggaagcctaaggaactcatgggacatcatcaagtggaccaatatattcactatgaaagctcagaaggagaagagggaaacaaaggaaaatgggtaaaaagcttatttgaagaaacaatggcaaaaaagtccccaaatctgagggaaaaaatagacatccatattcatgatacttaaaggactatacataggataaatccaaagaaatctacgtgagaacacattaaaatccaactgtatatgtcaaagataaagagaaaatcttaaattaaaaaaaaaaagagaaagaaaaagtgactcatcctgaacaagggagctcccataagattaagtggatttctcagcagagacagtagagatcagaagggagtaggatgatgtactcaaagggctgaaagtaagaaaactgccaaccaagaataccacgtcttccaaaactgtccttcataaatgaaggagaggtgactttcctagataaacaaacgttgagggatttcaagtctattaaacctgccttacaggatatgagaaagtgagtccttcaagttgaaacaaaaggacactatacagcaaatgaaaacacaaaaaaatatatacagcacttgtaaaggtaaatataatatggcaatagtgatgaaaaaatcacttttattctggtatagaatttaaaagataaaagaataaaaatataactactaactaggttaatggatatgcaatataaaagatgtaatctgtaacattgataatatagaatgtgttggggatgtaaaggagcagagtcttttgtatgtaattgagctagagctgttataaagtaaattgttataaatatgatattttatatagtctccatagtaaccacaaagaaaatatgtatagaagaaacacaaaaggaaataaaaaaatcaaggtatgttgctacaaaaaattaacaaaacacaaaggaaggtaacaagagaagaaaataaatgaaaaataagatccagctatatgctgtctattagagactcactttacatagaagaacacacaaataagctgaaaatgaaatgataaaaatatttcatacaaatgctatccaaaagagtgtagggttggccatacttttatcaggaaaaattggctttaagttaaaaactatcacaagatgtaaataagaacattatataataataaaaagtccattcaaccacaatggaatgaaactcaaaatcattagcaaaaggaaagctagtaaattctcaagtacatggaaattaaacaacacattcttgaactactgatacatcaaaaggaaatcaaaagaaaatttagaaaatatattgagataaaaacagaaacaaaacataccaaaaattatgggatgcaatgatagtaatactaagaggaaagttaatagtggtaaacacttacattaaaaaagaagaaagatctcaaattaacaatctaacattacaacacaaggaaccagagaaagaacaaacttaacccgaagttagtagaaggaaggaaataataaatactaaagcagaaataaatgacattatagaaaaacaatagaaaaaaacaatggaactaagttatttttttgaaaagcttaataaaattggcaaagccttagctagactaatgagacagagacagagaaagagagagagagaaaaaaatgaatccttaattaaagaggagacattaaaaccaatgccacagaaatccaaagggatcataagagactaatttgaacaattatacagcaaaaaattagataacctagatgaaatggatacatttctggaaatatataacctaccaagactgaatcatgaataaatagaaaatctcaagaaacctgtaattagtaaggtgattgagtcaataatcaaaaactctcaacaaagaaaactccaggaccagatggcatcactggagaattctaagaaacatttaaaaaattaatgtcaattcttcttaaactctttcaagaaattgaagaggagagaatactttgaaactcatattatgaggccagcattattctcattccaaagtcagacaaagatactaaaaagaaagttttcttcagaccaatctccctgataaatatatatgcaaaatttatcaataaaatactagcaaacataattcaacagcacattaaaaggattatataccatgaccaagtggggtttgtccctgggatgcaagaattgttcaacatacaaaaacaaattaatgcgatacaccacatcaacagaacaaaaaataaaaattacatgatcatctcagtagatgcagaaaaagcgtataacaaaattcaacatgctttcatggtaaaaactcaaactaggaatagaaggaaattatttcaacataataaaggccatatctaaaaatcccacagctaacacaacactcaacagtgaaaaaccaaaagcatttatgctaagataaggaacaagacaagaatgctcacttcttttttttttttttttaaagacagagtcttactctgtcacccaggctagagtgcaacggcatgatctcggttcactgcaacctctgcctccaaggttgaagtgattctcccacctcagcctcctgagtagtcgggattacaggcatccgccatcatacctggctaatttttgtatttttgtggagacaatgtttcaccatgttggccaggctggtcttgaactcctgacctcaggtgatctgcccacctcgacctcccaaagtgctgggattacaggtgtgagccagtatgcccagccagaatgcccactattaccacttctatttaacacagtatacaagtcctagcctgagcaattagacaagagaaagaagaagaagaaaaaaaatgcatgcaaactaaaaagaaaaacaaagtaaaattatctttgcagacgacataatcctgtatgtgtaaaaccctaaagatcccacaagaaaaactaataaacaaattcagcaaagttgcaggatacaaaaatcaatatgcaaatattagttgtgtttctatccagtaacaataagcaatctgaaaagaaaattagaaaaacaataccatttacaacatcatcaaacaaaataaaatacttaagaataaacttaatcaatgaggtaaaatattaatacgttgaaaatttcaaaacattactgaaggaaatcaaagaagtcacaaataaatggaaaaccattccatgtttatgaaatggaagacaatattgttaaagtgaccatagtatcaaaaggaatctacagattcaattcaatccctaccaaatcttcaatgtcattttttgtagagttcgtataagctaccctaaaataaatatggaatgtcaaaggaccctgaatagtcaaaataatcttgagaaagtaaaacaaagctagaggcttcatacttactgacttcgaaacagtttacaaagctacaccaatcaaaatgtatgatactggaataaagacagacatatagactaatggaacagaatataaggcctagaaataaacccacatgtatatgatcaaatgaacttcaataagggtgccaaggttacataatagggtatgaatagtatcttcaacaaatggtgcttggaaaactgaatatccacatatgaaatactgaagttggacccttttcttatacaatctacaaagatccactcagaatggattagagacttaaatgtaagagctgaaactccaaaattaatataatataggaggagagcttcatgatatttaatttagcaatgattcattctttggatataagaccaaaagcataggcaacaaaagcaaaaaaatagacaaataggagtatatcaaactgaaagctttttcacagcacaggaaacaatgaacagattaaaaagggaacttatataataagagaaaatagttgcaagccacatatctgatgagaggttaatatccatagtatataaataactcttgcaaataaacaagagaacaaaagcaaataacctgattaaaaatgaacaaaggacttgaacaaacatttctccaaagacgatatccaaacggtcaatatcattaaatatcagggaagtaaaaatcaaaaccacaagatattaccttatacccattaggatggcatttattttatatcaaaaattaaaaaaaaaacagaaaataacaaatgttgacaaggatgtcgagaaattggaacctttgtgcactgttgctgggaatgtaaaatggtgcagcccactatggaacatagtacagaggttcctcaaaaaattaaaaatagaattactttatgatccagcaattccacttcaggatatatatccccaagaattgaaaacaggatctcaaagggatattagcatactcatgttccttgcagcatttttaaaaataataaatgagaggtaaaagcaacctaaatgtccctcaatgaatgaatggatagccaaaacgtagtatatacattcaatgaaatattatttggcctttaaaaagaaggaaatgaaaatcctgttatatgctacaaaatggataaagcttaatgacattatgtgaaataagccagttacaaaaacaaatactgtctgattccacttatatgaagtatttaaatagactcttagaaacagaaagtagaatggcatttgctaagggttggtggagggggcagaagaaaatagcttggtgggcacaatttgaattttacaaaatgaaaaatatctagagatctgttgtgtaacaatgtgcacacagttaacactgtcgtagacttagaaataatcaagatggtaaattttatgttatgtgtttttaacacaataaaaaaagaagaaatgcattgatttttttctaccaccttcctatcattaaaaatggctgaaccattactaaggctttttaaaaaaatcactcctgatgtgagacaaagcatggaaaatgtatgctcaaaagaaataattttccaaaatttgtggataggtgaaaatcatgctttaaaatgaaaatggtatacattcttaaacttatttgcttttgtgaacacctaaagaaataatagagaagccagaaaactgcttatttttttataagtttaagcaaaaaaaaaaaaaagatgtgcagataaaccaaaataaagttaatgcatgcaatgagaagtaaacacaattgattaagtctgaaatagatttttaataggattatagattttaatgaggcaactttcaaagaagtgattataaattgttgcacttaattatttaaaaatgcacacatagcaacttagagaaaggcaggtgctaaaatgatccctagatgttccaactatatctctaattttgtgatttacagaagactgtatttaagacatgagtttgagaattttcactgctgcttcagtgttggatcagagtcaacatcttgattgtggacctggtgctgccaattttccctcacttcccaaccatttcttgtatgggctgtcatcccaaagttgacactcagactttagattccctgaattttcaggagccatcctcattatcctttccagctcccagaactccagatcaagctagaatccagagcctgcatgtgttcagaaagaaaggttgcataatttttctatgtgagtaattctcaactttggttttgagataacccagaacatttccaattatctcaaaaaacaaggtaaatgtatctaccaaaatgtacagttacacttcacttaaagaaatgccttttaagatgtttttagttgccaaataataaaaactacactacagtatttccataattcaatgattgttgcagcagctcttcatgaaaacagcatttttatcctcaaaataatctaaaatcaggcttcagacatccacaaacaatagacgccaattaaaaacaaaaataaaatcctgttatttctaccaaatgttttattctatttttgacttaaatattaataaggaggttgagcaagatggcaaaatagaagtctccccagattgtcctcccaacagggaaacaaaattgaacaattatctacacaaaaaaggaccttcataagaaccaaaaatcaggtgagcaatcacagtacctggtttttacttcatatcaccaaaagaggcactgaggagtgtagggacagtcttgaattgaatacaaccccaccttccccatctcctggcagtggccatgtgctgaagagagagaatctgtgcacttgggagagggtgagcatggtgattgtgggactctgcattggaactcagtgctgtcctgtcacagcacaaagcaacactgggcagaactcagccagctcccatggagggaacatttaatccaaccctggtgataggggaatctcctgtctcagcagttggaacctgaattccagcaagccttgccactgcaggctaaagagctctggaaagtttgtctaggccacaaggaccacaattcctggataaggaattgtgcggggcttgaagccagtggacttcggggagcacatgacctactgagacaccaactggggtggccaagggagtactttcaccacccctcccctaaccccaggcagcacagcttataactccaggacagactctttccttccacttgagcagaggagagggaagagtaaagaagactttgtcttgcaacttggataccagctcagccacagtatgatagggcattaggcagagtgctgaggcccccatcccaagccctagctcccagacaacatttctagacacaccctgggccagaaagaaacctgctatctttaaggcaaatacctagtcctgacaagattcaccacctgctaatgaaagagcccttgggccctgaagtactccttggtagccaggagtactcaccatgaaccctgggcgagactcagagatgtgctggcttcatgtgtgacccagcatattcccagatgtggtggctatggggagagaccctttctgctagagaaaaagagagggaaggggaaaggggactttgtcttgcagtttaggtaccagctcagccacagtgggacagagcaccaagtgggctcttaggatcattgattccgggccttggctcttggacagcatttcttgaactgccccaaggcagaggggagcctactgccttgaagggagagttccaggcctggcaatattcatcacaagctgagtaaagattcctttggccttgagtgaacattagcagtagccagacagtattcctcatgggcctggagtggtggtggccatatgagagagactcttatgcttgtagaaaagctgggggaagaataggaaggacttttgtcttgtggcttgggtgccagctcagttgcagtagaatagagcaccaggtagatgtgtcaggagtcctgactttctgatgacatctctgtacactcctaggcttcaggggaactcactgccatgaaggaaaggacacaagctcggctggcttcaacatccactgtagagccctggggccttgagtgaacatagctggtagcaaggcagtggttactataggccttcaaggggacccagtgctgtactggcttcaggtatgacccagtgcagtcccagtggtggtggtcacaggggttcttgggtcactccttccacagcttcaggcagctcagcacagagcaaaagaatttgtttggaaggaaggaagagaagagaacaagagtctctgcctggtaatcaagataattcttctgggttatatccaggaccaccaaggtggtgcctctgcattaggaaccccctaatgcagatatgactgcagtgaccaaaaacttagatcacaacaccaaagtcacttcgaatacctggaaagtcttgccaagaagaagagatgcaaacaacctagatggcaaagactacaataaatacctactcttcaatatgcagacactgaagaacatccataagcatcagtaccatccaggaaaacatgaccttaccaaatgaactaaataaggcaccagggacaaatcctggagaaactgagataggtgacctttcagacagagaattcaaaacagctgttttgcaaaaactcaaagaatttcaagataacacagagagggagttctgaatcctactggataactttaacaaagagattgaagtaattgaaaaaattcaagcagaaattctggagttggaaaatacaattgacatacttaagaatgcattacagtctctaagcaacagaacagatcaagcagaagaaagaattagtgagcttgaaggcaggctatttgaaaataaacagaggagacaaaagaaaaaaggatgaaaaagaagaaagcacatctacaagatctagaaaatagcctcaaaagggcaaatctaagaattattggccttaaagggaaagtagagaaagaggtaagagtacaaagtttattcaaagggatgataacagagaactcctcaaacttagagaaagataccaatatataagtataagaaggttatagaacaccaagcagttttaacccaaagaagactacctcaaggcatttaataaactcccaaatgtcaaggataaagaaaggatcctaaaagcagcccaagaaaagaaacaacatgcagtggagctccaatacatctggaagtagacttttcagtggaaaccttacaggaaaagagagggtggcatgacatatttaaagttctggaagaaataagcttttatcctagaataccatactcagtgaaaatatcattcaaatatgaaggagaaataaagacttttccatacaaacaaaagctgagggatttcatcaacaccagacctgtcttacaagaaatcctatggggagtatttcaatcagaaagaaaaggacattaatgagtaataagaaatcatcttaaggtacaaaactcactggtaatagtacacagaaaaacacagaatattataacactgtaactgtggtgtgtaaactattcttgttctaagtagaaagactaaacaatgaaccaaccaaaaataataactacaacaacttttcaagacatagtcaagacagtacaataagatagaaacaacaaaaagttgaaaagtgagggagcaaagttaaggtatagtcttctttaaaaatttttgataaggagccttactctgtctcccaggttggagtgcagtggtatgatcttggctcactgcaaactccgcctcccagattcaagtgatacttgtacctctgctttccaagtagctgagattacaggtatgtgcaccatacctggctaatttttctatttctttaagtagagatgggtttcatcatgttggccaggctggtcatgaactcctggcctcaagtgatccacctgcctcagcctcttgacatcctgggattatagatgtgagccacagcaccctgcctaaagtgtagtctttattagttttctctttgtttggttgattgtttgtttatgcattcggtgccaagttatcatcagtttaaaataataagttatgagatattatttgcaagccgcatggtaacctcaaatcaaaaaatatacaatgaaaacaaaaacgctagaaattaaaatacacaaccagagaaaaccgccttcactaaaacgaagtcaggaagataagaaaaagggaagagaagactctaagacaatcagaaaacaaataacaaaatggcaggagtaaatccttacttagcaataataacactgaatgtaactggactaaactccccaatcaaaagacatagtatggttaaatggatataagaagaagacacaatggtcttttgcctactagaaacacacctcacctatgaagagacacacagactgaaaataaagagctggaaaaagatactccatgcaaatggaaacaaaaaagagaaaaagtagctatatttatatcatatacaatagatttcaacacaaaaactatatagacaaggaaggtcattatgcaatgatgaatcaattcagcaaaaggatataatgtttgtaaatatatatgcacccaccactggaggacccagatatataaggaaaatattattagacctaaagagagattgaccccagtacaataatagctgaagacttcaacactccacattcagcattggatatatcatccagacagacaatcaacaaggaaatattgaacttaataggcaccatatatcaaatggacccaatagatatttacagaacatttcatccaatgaaatggatggagaatacacattcttctcctcagcacatggatcattctcaaggacagaccatatgttaggctgcaaaacaagtcttgacaaaatattgacaataattaaaattatataaagtatcttctctgactgcaaaggaataaaactagaaatcaataacaaaaagtattttggaaattatacagacacatgaaaattaaacaatatgctcctgaatgaccagtgattcaatggaaaaatttaaaagaaaatttaaacatttcttgaaacaaacgataatggaaagacaaaatagcaaatcgtatgggatccagcaaaagcagtacaaagagtaaagtttatagctgtaagtgcctacatcaaaaaagtagaaaaatgtcaaataaacaatctaacaatgcatcttaaagaattaaaaaagcaagagcaaaacaaactcaaaattggtagcagaaaagaaataacaaagatcagaacaacaaagatcagaacagaaataaatgaaacttaaatgaagaaaacaatacaaagatcaatgaaacaaaaaattggctttttgaaaagataaacaaaatcaacaaacctttagccagactcagaagaaaagggagaagacctaaataaataaaatcagaggtgaaaaagaaggcattccgacagatactacataaatttaaaggatcattagtggctactatgaacaattatacaccaataaattagaaaacatagaataaatggataaattcatagacacatataacctaccaatattgaactataaagaaatccaaagcctgaacagaccaataatatgtaatgagatcaaagctgtaataaaaagtctcccagcaaagaaaatcccaggacctgatgactttactgctgaattttaccaaacatttacagaagaactaacacctatcacactcaaagtattccaaaaaataaagcaagagagaatactaccaaactcattctaccaggtcattattatcttcgtaccaaaatcagactaagagacatcaaaaaaagagaaaagtaaaggccatatctctgatgaacactgatgtaaaaatcctcaacaaaatactagcaaaccaattcaacaacacattaagaagatcattcatcatgaccaagtgggattcatcccagggatgcaaggatggttcaacttacataaaccaatggatgtgatacatcatgtcaacaaaataaaggaccatatgattatttcaattcatgctgaaaaagcatttgatgaaattcaacatcccttcatgataaacaccttcaacaaactgggtatagaagaaacatacctcagcaaaacagagcaatcagacaagagaaagaaataaaggacatccaaattggaaaggaaaaagtcaaattattcttgtttgcagatgatatgatcttatatttggaaaaacctaaagactcctccaaaaaactattagaactgataaacaaattcagtgaagttgcagaatacgaaatcaacctacaaaaattcatggcatattgccatgccagcagcaaacaatatgaaaaagaaacgagaaagtaatctcatttacaatagctacaaataaaataaaatacctaggaattaacttaaccaaagcagtgaaagacttctgcaatgaaaagtataaaagattgatgaaaaaaattgaggaggcttcacaaaaaaggaaaagatattccatgttcatggattgaagaatcactatttttaaaatgtccatactatcaaaagcaacctaaagattcaatgcaatccctactaaaataccaatgacgttcttcatagaaatagaaaaaatctaaaatttatatgaaatcataaaagacccatcatagtcaaagctatcctgagcagaaagaacagaacaaagggaatcacattacctggcttcaaattatactacaaaactatagtaacaaaacagcatggttctggcataaaaacaaacatataaaccaatgaaacagaatagagaatccagaaacaaatccagacatctacagtgaactcatttttcacaaagttgccaagaacatacactggagaaagaacagtctcttcaacaaatggtgctggaaaaactgtatatccatgtgcaaaagaataaaactagacccctacctctcaccacatacaaaaattaaatcaaaatggattaaagatttaaacttaagacctcaaactataaaactgctaaaagaaaacattggggaaacgctctaggaaattggagtgggagtagatttcttgagtagtgccccacaaacacagacaaccaaagcaaagacagaaaaatgagatcatatcaagttaaaaagcttctgcattgcaaaggaaagaatcagaaaagtgaagcgacaacccactgaagggagaaaatacttgcaaactatctatctgacaagggattcataaccagaatgtgtaagaagctcaaataactttttggaagaaaatctaataatccgattaaaaaatgggcaaaacacccaaatagacatctctcaatagaatacatataaatggcaaacaggtataagaaaaggtgctcaacaccattgattatcagagaaatgcaaatcaaaaaactacagtgaaatatcatctcatctcatttaaaatgacttatatccaaaagacaggaaaaaaaaaatgctagtgaggatgttgagaaaggggaatccttatacgctgttggtgggaatgtaaattagctcaaccactataaataaataacagtgtgaaggtacctcaaaaacctaaaaatagagctatcatatgatccagcaattgcactgttaggttatatacttaaaagagagaaaatcagtacattgaagatatctgcacttctatgtttattgcagcactgttcacaatagccaagatttggaagcaacttaagtgtccatcaacagctgaacggataaagaaaatgtggtacatatacacaatagagtagcatccggccataaaaaaagaatgagacccagtcatctgcaacaacatggatggaactggaggtcattatgttaagtgaaataagccaggcactgacagaaaaacttcacatgttctcacttatttgtaggggctaaaaattacaataattgaactcatagaaatacagagaagaaggatggttaccagaagctgggaagggtagtgggaggttagaggggaagtggtaatggtgaatgggtacaaaaatatagtcagatagaatgaataaggtctagtatttgatagcacaacagggttcctaccgtcaacaataatttattgtacatgtaaaattagctaagagtataactggattgtttgcaacacaaagtatacaagcttgaggagatggatactccatttagcctgatgtgattattacacattgcatgcctgtatcaaaatatttcacataacccataaatatatatacctactacatacctgcataaattaaaaattaaaattttttgaaatgtaaaaaaacaaattttctataataaaaaataatgaaagtttcttgtaaattttccagtgctataaatcacaaatacccaaacctgtttctgctttcagaaacataacaaaataatcctctgattcttcagggttcttcaagctattgccactttcctttctttcccttcataggaaaagcttgtgacaaataaactgatgtctttgtctgatttcagggactgatttcactttttcactctgcacttcactatattctggcttttaaaataaatctctatggaattagtccactcccaaaatcccaattccctcccaagttgttccatttagctatgaagaattcctataagaagccacagctgactccagaattcacattagaaagcctgggctgctggtatctattcttggcccaaatcctaaactacttcaacagagcaaacttactcctctctagactctccaagcaccttattttgcttttagtgccattcctttattgtcttatcctctatatttaacacatggacttgttatttcagacatgccttcctttctcccatgttcatacctcctgataccaagatgtcatccccagaacatctcaggtaatgctgttcccaactcaaccaagcccagggactcagtgagttgtagccccactcccagcaggtggcagcccactacctcacttacttctgcttttgggacaggcacccaggtgaaccagtagccatttttccatctctatcttacctagcccctgctctatattaaatatggttgaccgccccgtttcttaaatgtgccactttcttgtttctctaacaccatcctcctgggaattgtcactatcaccctagccctccaactcaatctcctttttagatacattatttgatcaactcctgtaaaatattgatgttactttagattttcttctcagccctccctcttccttcacccttggctgcacattggaatcgcatgggagcttctacaaataaacaatgtgtgctctaccttcaacgattaccatttaactggatgcgggaaaggggtggatatccaggtattcgatttttttttttctctgagacgcagtttcgctcttgttgcccaggctggagtgcaatggcgtgatcttggcttaccgcaacctctgcctcccaggttcaagcgattctcccggattacaggcaagcgtcagcatgcccggctaattatttgtatttttagtagagatggggtttctccatgttggtcaggctggtgtcaaactcctgacctctggtgatccacccaccccggcttcccaaaatgctgggattacaggcgtgaaccactgcgcccggccggtattaggaactttttaaatctcccttggtatttcgatgtgtagtcctggttgagaacctcaggtataaacaacccccaggcctcattgaggctgtcttggaaacacgtgagaagcacattcctccttatcatccctcactgctgtggctttcttcaggcctgggtcattatcacataaatcaccacagtatcctcctaactcatttctctcctccagggtacactccacacagcttccaaagtgagctttctacaacgtcaagtttgattttgataatttaaaggccatcaatgtctctctcttccaaattatcactggaaagcacatgaggctctgtgcacgctgctctccagctattccagatgagacgcttggtcgcggggtcaactcaccacaccctgtggaggccccaagctttgtgcatgacatttccactgcctggcacaactatctccccgacccttccctcttaccccatgagtttttttttcctcatttgtgcatatatatgccttttgttatcttagaagtaatggttaaatggtaaaatgatatcaacagacatttggggaatacccactaggagcaaatatcctctagctctgctatccacagggtctggctgcactttcatcttcatatcttagacttataactactggtaatcatgatggtgaaatgctttagagattacaaagtgctcatttgatcatcaaaaccaccttttaagagactaaatgaatagatgttcaaggcttcttaaaattgaatattgtatataatatatcaaatatatagtcaacatataataggaagtatgttggggaaggagaaaaactgtgaggggtatcctcaggaatattgatgagtgtccttcaatagttaaagatgtatgaagcagagttacagttttaaacagtacagctgatatgcacacaaaattagttgatttcttgatgcttgatctaatattttttatgagccccactcagtattttgtttatcaaaggcagaatatcctctctttgtactcctgctataataatcctaatgctatccgcagcaaatggatgtgttttgtagaataggtggaaggtcttatctacagataggcaacagaagagtattaatatagttccaaaatattaaccctttacatttataaacaaagtacaacagttcagaacagtgttatgcaaaatcatcataaaaaatcataagtggcttccagggccgagccttgacagaggtgttaaaacaccaacagggaatgtgtaaatcaaaaggaaattggtgagtaatggaagcccaggcagtcaatgaaggcatcataaaatctgacttggcagggctgggtaagctctgcctgaggaaagagtaatgtaggctgatgacactcaacacttgaatgacatcctactcctaattgttgaggattagcaagcaactttctgtttacaacttcgcttcttgtgtcttttattcctagaaagagaaaactggtcattccaatatgactactgtaatccacataacaatcacagctcaccaaataaataacaaaactgtcatggtgtatatatcagtctctttcatattggtgaataaattcccacccctggggaaaggaaatccttggtgagttaatcaaatgatgtcttgtgcctgtatggctgagggccagatgtgggacttgggtgaatttgcaaagataaaaactgctttgtgaagtacgtaccctcttctgagaataagacgtttctctatcttccttccctacagctaacttggagtcataagtcaaatgattaaattccataccattttagatgcctagttagataatgctcattccaatgaatttataataaaacaagagacagtccctaaataacaaaatagcaatgacagataacatgtgcttccctctttcattatcataggaattcatatgtggaaacattcatacattccaaagccgagaataacactgtgtttatggagaaattcatctccttggaaagtatcgttcttatctggtttgaagacaaaaaaagacataccgtaggcccctaacaaccactagttcattgttgtaatataattgttatgtaacaactggttgctctggtgagaatttatacccaagtaactttatgaaattcatagatttgggacagaaagataacaaaaataacaaccaaagaaagcaatgactagtatcctcttaaaacttaatctttacagtatccctgtgaggaagtcatcaaagagaatatgcccagtagagccatcacagaggccgacccactcaactacattaactggtgtcatgagtttcacactctaacacacatgtgcccagccttaccaagagtggagcctgaattcaacagatcaactgccaaagggctggaagaagggtttttccttcaaaacatcaagatctaatttatgtattgtacaatagtaaatacattttactagtgagagtcctcccatatgtcatcagttttaattttatttcattttcaaagtctgagtatttacttttaatcggggtatcaatatcattcataatttcaatttctcccctcctggcaagtcaatgaaatgcatgaagttgtgaatagtccacatcatggactatgattgctgattcattcttatcatgacaatcaaagcaccggaaatgaaaccgaagaaataaaagctggtttctaggagattcatttaaattgtttagttgagttaaacatcgtgggcaaccaagtggtttatccttaacttttaaagagattcagaacagttacgttttctctaatctggcttggaaatgcgaggggtggaggggtagtcaggaggggtggcattcacagtaaagagcggggagtcacttggttaacttttcttgtcacactgctgtggggccagcctgtgtcttaccagaaattctgagtgcctcttcctacgattaagtgaacatttaatgactgactcttaaagaacttttaccaaccaaaagactgatttgaaaatagaaactatacattattttaaacaattgagatgttaagtttaataatgttaatagatgaatgcaatgttaatcaaaagctgaacctgtgggctttccaacaaagaaatgttaaacaaataacaatacactggagttatttgttttaacttttaattttttgttttcttaaaagaataagaaaatgttaaaagcagtttggagtgatgaaaatgtataataataccaaaaataattcactcaggatgacaagtggtgcctactcatagatcaaatgtgtgagtggcccacagaaaacttaagcttccgataggcatctatttttcatttgaaaataaaggttaaaattgcaggcgtatttggggagaaaataacgctggcagctataaaatgttattaaataatttatatcaaggctattccaacactggtaggtggatttacaatcttttaaaaccactagaatttgggaatttgaaagcaaaaaatgaacaaacgaggaaaaataatcttctggtgtctaaaatatgatctggcagtttgtaatgagttcatgttccaagcaaagcatcagccagcttgaaatgtcaatcaatattttatgatgttgtcattatttttcacaggggcccaagaaaccctgctgacccaggtgtggattaattacatctagtcagcttcaacagcttccttaactgtcatcctttccttttgcctctttcctgttacacctgcaacttttagttcgcctctcaatttagacttatgcccttcacacgttatatttgctcttcaaagagaggtcccaacctattgcttcagatgtcttgacatgtacacctacctggatatttatggataccacatgcttatattatttccagaagtatctataggcttttttatgtgtaatatttaataaaggaattttcagagtaagttctattaaaaagataaaagctaaatttaattaagtaattccaaacataagggaactaagaacaactctgacaagaggtcaggaaaacacagtaagaatatcagattgaaggctccccatccacttattcattagcttttctaactgaatctttaatgggagggccctcctttagaggtcagaaggaatttggtcctcactgtcttctgccctgtcatttcatctcagaccaggttccacttaaccatgtttattccaatatcaagaacaggcattgaactaaaaaatgtataactgaatgcgcaatggcactcttgtagtataatccgtactcttaagcattttgtcaaaacaggtacaatatatgaaaaacttgaagggacactcacctgcctcacaattttcagtcacgagccctttatacaggtggtggctgaaggaaatctttacatcttctccttccatgtgaatgaccaagagacccgtggttgtcctggctggaatgccctggtctgtaacttttaactgcagccagatagggaagtattctgaagatggattttgctgaaattgaatttctcctgtgtatttatcaatagaaaacattgactgggtctctgcaaaactaaaaaccacagttccattgggccccaagtccaggtcatcagctctcacaatgacagttgtctggtttgtaggcgactcgggggaaagaaacacatcaaaagggttctgttccaaaactggatcattgtcattaacatcagtgacatatacttttataattacagtggtgcttcgtgaaccctggatgctacagtctctggccacagcactaaatgtatgctgagatctggcttcacggtcgagggtgttgctggttttcaatgtgcctgacataggatcaatggtgaatgcaccagaagcctcatcagtcagaaaatactcagtttgcccattcaggccttcatccttgtccacagctgaaagcacaagaaccactgttcccacttcagcatcttctctcacagaggactggtaataaagtgtgggaaaagaaggactgtggtcattggcatccaaaactctaacttgcaggtgtattacagagctcctaggtggatctcccaggtcagagcacagaatgacaagggtaaaattgctgatttgctcccggtccaaagcacgagtggttgagagttctcctgacatctcatttatagtaaagcactcatcagtatttccatctattaaagaaaacaattacaaattcatttgaattgaaaaagtagcagctctttgctagcactatctatggtattcatttatacattcattaaaaatatatttattcccgattatattgtatcctagcacttttgtaaatattggggatataacagtaagcatgataaaggctctgccctcatgaaacttctattgaggggataaacagaataatatgattcaatgcctatctttaatcagtcaataattagaacacttgctttcactaatttgcagccgtatgattttttgtgtgcatctacaacttttaattttaatatatttttcctcataagaggatgaagatatatgttttatttaacacaaaacaatagatgaggataaaaaaaacagaatataatgtccttttttaagatatcaatcagaaatgaacagatttgatttgtagttattttctcaaatagtacccactacagtattcatgcctgttatactattgcagtaagccttctcttctacatgtccacagcattttgtacaagaatcataacactttggttagagttagttggacacttgactatttcttccaaaacataaataaggacattgttctattcatctattccttaaaaaaaatctgccctttattatattccatcgtatcaagtagaataaaacttaaaattgaacacagggacaaaaagctttcaaagacatttttaaataaccctgaaaattagtgaagaaaaatgtggttcatatgcttgccagccatattcttggatgaagagcaggcccaatagtgtgggaacttactagagtctgcatatcagaggcatatgaggaccaagtggaatggcattcaaaggaaacaacagcaataggtagctttagggaggaggagagggccctgcatttgtattcatgaggaacagttaatttacaccaaaagtagagatgattggacaaacccacatttctgtagtatttgtggctgataaagtgattcagtcattcagcaaacatttgatgagcatctactatgtgccaagtttgtgctcaagatcacagatatgaagggagtaagacatgacctagctccaagagttcacagtctaaaaggaaaggctggtcaatactcgggtattaaagtaccatgtgaaaatcatatgtacagagtgctaaatgagtacatatagatagtgctagccaaggggtgctatttctctgagaagtacagagaaagggcacatagtcctatgttagtaagttcaagaaatgcttattggaaaaagtgacatcaaatctcactcctaaagtggagaaagccatactacaagttttggggagagtgttctatgcagaggaaagagcccgtgggaagttctaggaatataagaattaacaggctgcaaatgtttgggtgtgactagtacacagggttcctgggtgtttgtatgtggcaagtaggaaaagggctggcagtagcggtagaggaaagacatgaatttgggaggtaagcagggggtcaaattgtgaagggctctctgtatactgctgaagattctatagtttctcctgaaatccatgagggagccccctgaaggattttggacaggaaagtgtcatgaatcaaatttctattttaagaatagtatcgaggcagcaatgtcaaagtttgtttagaaaataggatggttcctgtaatcccagaacttttggagaccaaggcgggaggattgcttgagtccaggaatttgagtccagcctgggcaacatagtgagacctcatctctacaaaaaaaaaaaaaaaaaagtttttaagttattcaggcatggtgacatgtgcctgtattccccgctgctcaggaggctggggtgggagaattgcttgagcctgacagggggtacaggctgcagtgagctgtgattgtgctgctgcggtgagctgtgaatgcaccactgcacagccttggtgacagatcgagagcctgtctttaaaaaaaaagaaaagaaaatgaaaatgggaaggttaggagtcatagtaatctacttgcgcaacaaggggtatctgaaacaatatttgcgtgcaggaagtgaacacattgcaaagatattaaggagaaaaaataagttatggagaaaggattcatgatccggcttaggcgaataagtgaagggtgtttagaccagtcaatcatctttaaaatgagggctgagtacagctaggttacttgaagttttctaaggaattcacttggaaacaggtagttctgtggtaatctccagaagttcaatttaaatatccttattcctaaaattgctctacctgagagctcacctgggatcatggaatttatctttcccacattcacctttataagcactcttcttgcaaattaaaaaagaaagtctccctctcacccaaataaatggctgccaaataaagtggtcattcccaatgttgaaagttcaatgtcaaaacagtgactgattttaatgcctgggaagatatccttatgcagtgggagagtgtctctgctatcaaccaaattatagagcctattcaagttttcaagtggtagataaagaaaaaataaagactattcattaactttttggcatataactcagaaggcatacaagtactaaattaacttctgtaacaatacttccatttttaaaaaggtgagcaaggattttcagttcttacatctgtaacaaagagaaacagcaacagacttggcactgtgctttgccttttgccttatttttatttatttatttatttatttttatttttattttttgagacagagtttcgttcttgttgcccaggctggagtgcaatggcgcaatctcagctcacctcaacctctgcctaccgggttcaagcgattctcctgcctcagcctcccgagtagctgggattacaggcatgtgccactggctaattttgtatttttagtagagacgaggtttctccatgttggtcaggctggtctcaaattaactccagacctcaggtgatctgcccaccttggcatcccaaagtggtgggattacaggcgtgagccactgcacccagctgctttgccttattttagcaaaaaggaacatgcattccgagaatcatgaactcactggaaaaaaggaacccattaatctgattcagagatgcatttacaacacaattttactttttatgttattattggtcaaaattggaatacacttttgctattttaatcttacaatcataataataacaatctaatataattttcaaaactgagaccttatgttcattggaaatttttagaagtcttaaatttatccacatattttaattgtagaaaagtataataaaatgatcaatattttaagcataaaagtccattacgttatggtaaaattctgcaaggatgtagaaaggtaatattgattgaagaagtaaaaatgcaaaacatataactgaaaatgctcattcatacatataattgaaaaaaacttaagtaaaattctacatttttattaacttaaaaaaatcatatttcaaacagtagagtctgtgagctatgaaaatttacaattcacttggcattcccagcgccttgcgctccctgtgactgcgctgtgcaggcgtcttggtttgtgcagggtggttctcatccttgccagcatccccttcccctttctccccttacacacctcactcccttctttgccgagttgtgggggctgttttaggcctggcttttgtttttggaagggcaggtttagcagacaaccctgcctatctcctgtgtggctcctctatcacctttgctgtgtcacctttttagccgatttcctgggcatggtggcttggcaggcagctttgccaatccaaggtatgctctctgctcctggaaagatttctgagtcccacagccatccgagggctacggagctcccagtttccaacctggctgagaaggtggcctcagcttgggcagaacaggtggagactttgggaccatgaagagacatgcagagccaggaaagaggaaggtgacacaaggggaggatgcctttcatatatatatacttatatatatttcatatatatatacttatatatatacacacatatatgaaatatatatacgtgtatatatacacacatatgaaatatatatacgtgtatatatacacacatatatatgaaatagatatacgtatacacacacacacacacacacacacacacacacccacacacacacatatttttttttttttttgagacaaagtctcactcttttcccccaggagggagtgcaatggcacaatctcagctcactgcaacctctgcctcctaagttcaagtgattctcctgcctcagtctcccaagtagctgggattacaggtgcctgccaccacacccagctaatttttgtatttttagtagaggtggggtttcaccatgttggccaggctggtctcgaactcctgacctcaggtgatccgcccacgttggcctcccaaagtgctgggatgacagccatgacccaccgtacctggacacctttcatatatttttaaggtttttttattctatcaaatacttttaaaaggtgattgatataacagtcttattttaatgtgtcaatatttaggatatgctgggaaacacacctttgttactctttaaaaaaagtttagttgacaacataaaaatatgtctgcgtacataagttttcaagattattttaagggtaagtgaagcaaaaaaaaaaaaaaaaaaaagctgaagatcactggcagagactagcagaaggacccagaccatgatgggggaggtagaaagggggtgaggctgatgtgtcattttggacacactgataatgcaatgctgttggatataaagactgggtccttggggctgttaggaaattgtgaaataatttgaaataggaggaacaaggttagtaggtgtcctggtattgaagaaagaagggtggggcacaggtgtccagtgtgtctttgccatcagaatgttcttccaccttcaccgcattttgaccactctgtaaattgttgaaaactgataataatgtaaatgattcttatccacagaaatgcaagtaaatctggtgaaatgcactgattgttgtcttgcaaatacaccttttctgcatttcagaattccttattccctttgtgtgtgtatgtgcctgtgtatggctcttggaattctccttgaacccattttaacatctttttggtttacttattcattagtgaattaaataaaagttattcgcaggtaccatttttatatttgtatgagagttattactttacttttaaaaacaatatcctttaacgggacctagatctaggatgcagatggagatgggagccattggcatcccagtggtagctaaagacagagactggatgaaatgacccagtaagaatctgtctatgagacaagaaaaattaaaaaaaattaaaactgatcacatgaaagcaacaaaaatagaaaaacactatcttttccatccttacatccactaatgttagcatagaaaaaaattcacagcagtttgcaaaggcagatttttaaagaatgtggagagcagtggttcaaggtggctgtgagaaggaggtagagagaaagctcatggcaccagtcagttctgactgggtgtgtattttgtagagaaaagcaacaggtatcaaacacagagtaatcaacagagagtgtgtgtcaactcagtcagcatcctggaataaattttaatttaaaaatacttaccaatttgggaggctgaggcacaagaattgcttgaacctgggaggtgaagttgcagtgagccatcgcgccactgcactccagcctgggtgacagagtgagactctgtcttaaaaaaacaaacaaacaaacaaacaaacaaacaaacttaccaattatgtgatattcaacagctctgttattgccagcatccatatcagaggctaaaaccgtatagacaacctctggttcctggttttccagaacctcaatgtcataactggaaacaataaactctggtgcgtgatcgttttcatcttcaacagtgcagaggattgttgtggtgctggacaatgaagggaatcccccatctcgtactagtactgacacagaacacaaagacggtatgaattgtggcctttgattcatacctaaaatatgttgttctaactagacaatgtcaggctaaccaggtagcactggctcaataatattttatttaaaaacaccccaacaaaatataacatttcaccacttaacaggttttttttaaatttaatttttaatttttattttttagcctactcaaagaatcccttacctcgaagggtgaagacttcttgaatttctctgtcaagtatggtggttgtcactacctctccagtgtcagaatttatctcgaataattcaaatgaagcacctggcatgatttcaaactgaagcttggaattgactccttaagaaaaatataaagaaaaacttagcaatcatttctttgaaatacatttatccactttcctatttcttttcctttgaacatgttaggccatagatgaaaatggcaagattctcaaacagcctttaaattaaggtaaaagaaaacctcttttggctgttcttgctaaaataaaagcctcatgggctgaaatgcttgattttcaaaagtcttatgagacttccccacagtgaatgcttagaattttttccttcccataaaaaatttcttatgagtgtgcaactctacaacatattcctaattactccttctaacacctctgattgtgatttaatgacttaattgtaagcttgcagggcaaatgacaatttctgtagattgacctgctgtttaaaagcccgtgctaagttatagaactctgtttattctcaacctcaagaagcgagcacctagaattgcttatacacgtatttctgtttgttttgttttcgacttagtgttcagtctgctatctggagtgagaaatgtggtaccacattattatgcattttggaaataattcttcccatatttttgtggtttcatttctcccctgagaaaagtatcacgtcatttccatctctggttatgaagatcattcatactactaattttaatgagtctgtcccatgccattgtaatttattgcattttacacaagttcctctcagttattttcctatgttcctttcttaactgacaagaatctaggtgtacacacagtactgagaatatatgatgttatactttaataaaagacgaaatgtcattcttttggccttaacaaaaaatcttcaattacaaatttccatcttgccagtcttaaaaagtaaattttcattacattatgatctggcagatattatataggactgagagctgaaaggagtgaaatagaattctagttttatataagaatgaaaatacatatcatattactatataacttggaggagaaatatatttgagatataatctgcaggcattggaatgaccctgagaaaaaaagtctaataacataggaccaatgtatttgatatgacatggtcagaggtcaccaaaatgtttcattctattattaggcattacgtatattattaatgatattactaaagagtcatagtgattatttcagtaacttaaggatcatataatctattctatagcaagacagaatttcttaaagttccaggttgttaaaatttgttattcctatctctgcctacattataaaaatgggaacaatattatcttatatttactttccttttcctcaaaaaaaagagagaaatatcaggtgccaagcatagtactatgtgccaaagacagagtgctgagtcagatatgacctctgtcttcaaaaagattacatggatcttttaaatgaatgagctcatttatatgattttgttacacattatatatacaccatttcatattattttatatgattttcttacacattatatataccattgcatattatgtattgtattacatattatagaatgctatatattatacatttttaattctcaccacttgccaaacctagaaaatgtcttcaattgtttacacataaattcagatctttctgctgtcccttcccattatcctctaatgtgcttcaccactctactcaatatttctctgactttttagaaacttccagattttattttgttctattattctatacaggttttttatccctaagataacaatacattaaccttcaaccctcctagtatattattaaggataaataagatctttacctataactgtagtctgcatacacacatttttcataccccaaacttcataccctttacaaattaggaagtaaattaaatgtattttactatggcttatttggaatttaactagtgccttgcaccttacacccttacacccttataatcctacagaacaaacatagcatcatcaaacttgagaattaagaaaataaaaattaaaaagaggttatttggcctcattctatcacctcactgagcaaattggaaatttggatctgaagatatttagtgatatccttatgacacatgcccactaaaagatatgtgtgtgtgtgtgcctgtgtatatatgcccatacctatgtgtgtatgcacaccagtgtgaatacacacatacacagatgtgcgcgcgcacacacacacacacacacacacatatctaccttctcttagacttcaagacctgcagtcccatgacttcttaatcctccggctctaggatacctctcctcaattcatttctctccttctccagtccggccccatgagctattcctctagcaaccttgcatagtttctcaggtcctggggctttctgccaaagatttccagcaaagcttcagcctgggatcattccaaccatctctttactccatttgaatatccaacagatggctggggctacagaaaatttcacaacagcatggattgagacaactgcagtgctgttgtatctggcaatctttccaggtgtccataatcacccctcttccattcaggtctcctacccgaccactacctggcttactctcacagatcacttccctttccatttcccagagagaaaggaggcattgggaaagaactccctcaccctctgcacctgtactcaactgtaccccttactccctgtctcaatggcaaaagtcattcttcaaacacactctcagaattttcctgtcaggtctagtctttctcctaaaatttttttccttaaattatatccttctctagctataagaagaattaggcttttatctcctcctctttgtggccaaatttcttttgaaaatcatattcagtctgcagctagcttcaaaccatgccattgccagttactctttctacagtgaccaatgaccttctgattataaagtctactggccatttctagttcttacctaacttgtcttctctgtggcatcatatatggctgaccaatttaaaaaaaaaaaacaaaaaacaaagaaacaaaagaagggaggggaggaaggcatgaggaagagagaagtaaaaaataaaagaaaaataatatttttgtctgtttctctatgacatatttttctcctggttccaggagtggggtgcattgacaatcaatgtgctggccatcacgccattgtcatctcactctatacattcatgtcttcagtttgcatccatatctatttggttggttcattcatttattcattcatgtgttcatttatgaatgcacagatactgaatgtcaggtactggaaaggcaccactgaatagttaccttggacctcagagtttctctctagagtggaagatgattaaatcaacgagtaatggaaagtgtgatggaatatatgaaatcactgagggagtggatcatagaagacttatctcaggtatatagtttgtcattaattatctcattgtattaacatatataaagagtgatcttaggtgccaagataccataccatgtgctaaaaatataactgctagtaaacagacaaattctctaccctcatggtgcttacaatatagcaccggatacagataagcaagctcgcagtgacaattccccctgaatagacatgatgggtaagttgagttgccttgatataaccggaaaccctaaagatgaataggagttaatgggtaagagggaagaaagaacatttgaatgagttcaaaagaaaatctaaataccttaccacagtccacaaagtcccatatgatgtgggctctgcatatctttccaacctcttttcatggacttgctcccttgctatattcttatcgcactggcttcctttctgttctctgaacatactaagcatctttctgctgaggcctttgtagtggttgttccctctgcctgctcttttcagttcttcacatggtgtattatttattaaaccatagtgtctcagatccaaatctgttcttctgtactccaccctgtgatgctgggtctggggatctgcaaactacattccccattgccaactacctctctcctagggtttgccacaaaaggacactagaaggagaccaaaagtcagaaggacagaaaatgggacttccttcttcctagttacctactgtcgtcatcagcaatgctattcagtctgttttgctactcctttgcaaggccccctctctcatttccttcccagggtctgataatccaaacatcttcttctttcccagtattaggggtggtagctgccttctagagctttgtttttgtctttttggttacttcagtattcccttcttgcttactcattcatccaacacctgtttgtagcatctattcttcctgactaaacatggctgatagagcacttggcaccagaattgggtctcaggtaacagggactctgagattggtttggttatgtcttaggctttgaatgcagctatgagttccttaaccatgggaaatggaatgctaggaattcaatacttggagtgctgtcacgattaattaaattatcaatcatgtttgactgtgataaagtgactattaaaggactcaaattccttagagaaccaaatggcgctgactttgaccacataatagtaaaaaggactatgatgcagaagactgtttttcaaaggactaggaaattatagaacgataactatgagctgaggctttaaacctgtaactcaagtcatggttagaaagctggaaagctcctatatagaaggcctaaaattaacctccctgaagatcagacccaaattgagtggcaggtataataaataccttgtaaggagatgactattcatgtaaatacccataaccagagtcagatttcaacataactcaggtagccaagtgcaaatctgactcagtcaaagaagcttatagtttcaaagaataataatattttctaagttatattggcataaacctggggaatatgtgtggaaatcagttctaagaatgtgagacctaggaagatataacattggtttaggctggatttattgatagataaatagacaatattgatactgtttgctagagagtcagaatttaatgtgttagcccatagagctgtgtctcttgagagtttctttgattggttggattcaatgggagcctataatcactgaggttgagacattaggtcttcttttgaatactataaataatccaaagcttaaggaaatgagaatgttagagtgaacttatcatgtatgacatgctcaccaaacactcccactacctttcccaagagatcagaggaccctaccttcataagtacactgggaaagatattagaaggccatcagcatccttgaaaagcagaatgggtgctgttttctgtagactggggatggatcatggtgccaatggtcccagggaccaccttttgagaagcaacatttgatactaatttataagaactatcagaactcattggctttcacccatctttatgcaaactctcccactgttgacatcatctagttggtagagatattatgatgacatcatgataattggatctgatgagcagaaagtagcaagtaacttagatgtcttaattagacacatgcattagactagggattggcaaactacagtccagtgatcaaatctggcctgctccctgtttttgtaaagttttattgaaatacacacaatattaactatggctgctgtcttgctatagtgtcagagttgcacaaaggagaccgtaaagcacacaaagcctaaaatatttactatctggtcctttaaaggaaaaagttttccagaattctatcctagagtaaaaggtgggagagtgctaggagctgagaacagacaggaaagctgattgttaagctaaaagggataaaattttatcctcctcttcctcaaactatggggatttaataaagaattctttccaggggtgtgttatttttaggaagatcatttttcttttcttttctttttttaagacagcatctcactctgccacccaggctggagtgtgcagaggcacagtcgtggctcacggcagcaaattcctgggctcaagccatccttctacttcagcttcctgagtagctgagactacaggagcatgccaccatacccaacaaatttttatatttttttttgtaaaggtgaggtcttgctatgttgcccaagctggtcttgaactcctggcttcaagcaatcctcccacctcggccttccaaagcactagtattacaggcatgagccaccgtgcccagccaagattcttgtttgtataatgcctcgactgtacaatgtcctcacaatcaggcatttctaaagcaaaaatagaattatgcctggttgattgaataaaggaataaataataaataaattctaaacagtgagggcagcttgaggaagcttatgtcatacatgcttcagtttctcagaccatatggtcaaaaatatttattgagttcctatgtcatatcttgcactactctaagaacctggaataaatgtattaatagataaaaagtgctgaatccaggagaagttcacagcctagagaaaaagcaggtgaataaacatttacacaattataatactatatattaaatgtattaagaatatataccaaagttttaacagtgattgtctctgagtgagtgaggttatgactggtccttattctttttcatctccttatttttgatatttatgcaaatatatttataatagaattttttaatatatatatagagaaaatttatatagagagagccaaggaaaacataacagcactaagggattagcagaaatactgcagcctaagtaggcgatggcttcaattagcatgctgttgtgactttctctagcaaatgttccatagctttggattgggaaattcaacttttgaaatgctctataatctaacccgcctttaaatccttctctgggacttcagtataatcgaggttgctggaatggcacaaagccagtaagatcggcttgtgcttgaatcctatggatctccttatgtgcccctggattaattagattgaatctaaaatgatggacaaatgccactggggaaagaatgacggggcacgtcaatgaataactactaataaagtgcagagagacccagcgctgtgactcacaactgtaatccctatactttgggaggtggaggctggaggatggcttgaagccaggcatttgaggctacagtgagccatgattgggccactgccctccagcctggggaacagagcgagattccgtctgtataaaaataaaacacaaataaataaaaataaaggatcagggatatgttctctttaaatgaagtacggaggaaagttgatggatattttgcctgagtatatgatacagagaaaatatcactccataaagaaacatttaaaataaactgaatagccagatagtattgtccactcgaatgagaaattgttattacaaaatgccatagattcagatattttagcatccttatcctttattctttgatatacacacaaataagtcaccttctaaagggtatacagaatggcaccttataacttcctatgaagataaagctatcagcccagtggaagtattccaaaattagatgcatcttacaattaatggtgtcttagatttgatgaaataaggtgtttctccctggctccaagtgtagacttaggcggtgcagttgtacacctagtgcagcaccagggattccagaaaaccagatgtagtttattgaagatgaccccagaaacagaatacattcttatggaatagagaataacatccactaatgaattctatatttcagtgtggcaatatactgttaagttattttacgtttgacacctttgagcgaatgtgagtggtattcccagtggggcaccctttcctcttgggagtgggggaagggcactgcagggggagctcttttttcactaacaatggcgctcttgttgatggcaccaaatgctgcagcagttttaataccttagttaaaatctggtagttgttttttccttttgatacaagaagaaactcctgctagagctaatgtgagtcatataccataaacattcagtgctcaaatccctgtgggctttgaatgccaaataacactgtatacttacatttttaaaaactgcatcgtagaatgctagaaaacacatgttaagctctctagtattaaggaacactgtggtatttttttaaaaaaatacgtactataaagtaaaccattcataaattccagtgtaatgccagttatgttaaaatcttgactaagtcatttaattctcatgcataatcctgtttcattgttttaacccaataatcaaaaaagaaaaaaaaagattgagggaaaatatattcgaaagtacgtgcatacacacaaatattcacatgtgtttacataaccacctacttaacagacctggcctcattaaaaacactgagatttccagtaaatcaaaattgtctccaaaatatgtaaggttacatgagactcatgaagatgttaatgtgtatttcaatcatccattaattcagaaaaacaataattttgtacctaaattctcagttggcataccataatctctagaataataaagtttcaattcaattataattagcaggttgcagataattcattctaaatgaaaataacattaacactgggcaacttgacagtaaaaatcagaagaatatatttatggtaattttctttggttaatatatgcaaattttgagagaaattcttttctccctcttcaagcattaaagcaagaggagcctttttagtagaatccattacaaaaaaataaaattcataaaataaagcaaggccaaagggaggaagcattttacataccttactgtttgcaaaatcacacaacatcagcaataagttcagtatatgtctatatactttgggaagtagtttttgcattgctcagcaccctgtattgctctgtttctacagagaacactctaagagaactttactgagctaaaattattgtgaaacacaaagcttatgtatattcttcattgtttctgacaccctaaaaatgaatactgccaaaaacgtactaagttctaaggacagattggagcaaacaatcgttagcatgcttcggactcaactcttagaaaaactctttgatcacactgccccactccggtcaaagacagaaaattgggttagcccttgaaaagagtgttagtaacatcacatacaaattcatgtaaaatgcatttcattaaaagacagtgttttccaagagggcaaagtattcaaatattttataatttactttaaaatttcaagtaaatgtatcttttgccccttaaattaacaatgtacaaggaaatgctattattaatactatttccataaaaatatctattacaattcttgcaaaaatataacaaaatattacattgatatataatgccatttgctatatacaaacgtaaattttaaaagaccggattattaaggtgaactaacacgaatagtttatattcatataatattcatatttacattagttcagtgtttcacatgtgaatgggaatataaactattcatattagttcagatggaaaaattcagcatgtgctgtgaataagaaacacagcactgtaatttttgtaattattttgtttaagataaaaacagaatatggttaaagttgctgaaccttagttgccaaaacagccacagtgatgttgaaaagcaagtctaagaaatttataaattcctagccatagtaattgtttactccgaagtcatttgtctggacatagtgtttgaaaatagtaaaaatagtaacaaagttaacatattgaccatttattgtgtcagacactggtctaagctctttacaagtaataattcattcatactcataacaaactataatttaggctctgttattatctccatatcacagataagtagggaaatagaaagaattagtaacttgttcaaggtcacatggcataagtaaatggtagttttggattcaaatctaggcagtctgacaccagcaccatgcctcttccactatgctatatatacagaggaaataaagaaccatttatcttcttcttcttctcaatgtatctaactattatactctgaaagaaatgtgatgctttgtccatacttcgattatcaagatcaaatcaataaagtgtatgttaataaggtgtgtatcaccctaatataaataataataaagttaatacaagcaaatcttatgtgatatatctgtatctttacaggtgtatgtgtttctgtgtggatgcaaatgaaagaagtattacaaatttgagataactagcaactgttcattttttctgagccataactattataaattacgtcaattataatcttcaatttcttttaagcattaaatacccagtttctgtatttctaaattacctgaatctctgtccagagcttcaaccctggtaacaaactcccctggattttggttttctttcactgaggcttcatacaggtgctgcttaaatactggagcttcatcatttacatcaagaacagtaactgtcaaagtctgggatgaagaaagtgctggtgtgccatcatccagtgccagaacagtcagaatatgctgagttttcatttcataatccaaaggacaggttgtggttagtaagcctgttttgaaaatggaagaaaagcaacatgtaatgaatattctttagagaagtcatgcttactccacttatatctaacttgtctacctaataaaaattcagaagtcttaactgctaaaatatgaactgcattaaatcatctttaaatgtatacactatctacaattaaaagcaaacatttttagtcagaaaagtcatctcaatttaaattatatcaaacaaaacaattcaagaataatcaatgttatgcaattatctactgagaggattacattaaaattctctagccaacatctacctcccttttaaaaaatatctaggatactaacaatatatatcatcttcatgtcacataacacctcatgtataaaagcgaccaagttacaaaaatgtgggtatggctatattctttaagacggttgatttttgttaaagaattatgctctcttaatatttattctcagttaactggattttttttaacaataaagagcaggccaggtgtagtggctcaggctgggtgtggcggcttacacttgtaatcccagcactttgggaggccaaggcaggaggatcacttgaggttaggtgttcaagaccagcctggccaacatggtgaaactccatctcctctaaaaacacaaaaaactagccaggcatggtggcgggtgcctgtaatctcagctgctcgggaggctgaggcaggagaatcactggaacctgggaggcggaagctgtagtgagctgagatcgtgccactgcactctagcctgggcaacagagcaagactccatctcaataaaaaagaaaaaaaagcaaagatgttataactcagacaatacacttcacaagtaaaatgtgtctctatcccactgccatttaagcatataaaccacataagtcagatgtaatacatactggcacacagatagccattatatgattccaattatcacatttttcttttaggattgctgtttgcttctcccttttataagaatttttcttgaaataatgaaagaagtttacggaattctattttataaaataatttttcaataattactcatcactttatatttcacagccatagccacaaaaaactcactgtcttctttataagaaatatgagttttgtgagagaaaaaaatcccatctcatatgaatgcatttggcaattatcattttatgtctttgaaaaacatctccattgaaacagtcactgcaattactcaagagattcacattacctatattaccaaaacacaagtttaattttatccattctttttaacaatctgaaatatacctttcttagccatcttggaacacattccaagtattactgaaacaggtccttggagagcctcagctctaacagatatcagcagcctgtgtctggactatttctctgtcagttgggcatttaggtggtgtccatgcatgcctcagaatgaaaccacatgtacaagatttaataaatattttgatgaaattttccaacggaatatagccagactataatcatgacttccaaatcctccacatttaactccattccaaataatgcttttaactaacagttgggccaaatggtgtatatctgagatttttttcattcatgtagaaataactttattttttagtgaataagatgagagtttattaatttttcaatattccctgaaaatcaggtaggaggttcatttttaaagtcataagactgaaaatttgtacatttactcttccatcaaactacataaaaaacatataatagatgttatctagcaacatggtgacagcaagacaagtaaagttgagggtgagtgacatttctgcagagtacctgacagtgaataaatgcttcttcaaaaaaagaaatgttacaattgatgtgaaaagcaggggtcttaatgtccaaatgaattcagccattaaaaatatatattatttccaatatttacgaatacatgtttgtataatctcaaagataaatttccatactaaagtctttgaacaatgctgttgatttgtcatactgctacctgattcactattggtaccatatcctaccctgcaaggactcacaatgggggcaaagaagttttctgttgtgtattcagcccatagtgtcagctagctacagagcatagttaatattaacaaacaggaccattaaagttagttctccaaatacaaaccctgtgtctattttatatatatatgcatacgtatatatacgttatataagtatatacatatatacatatataagttaaacaacagaagaagtcaaaaatatttaaagcatatgtatcttaagaaccatcattttaagagaaaaaaaagaaaaagttaaatataagcaagcgatgagagggtttaattgaaagtggcaggaagagaaatgaaagtcatccaaatcagaaagaaagaagtaaaattatccctgtttgtagattacatgatcttatatatagaaaatcctaaagactccaccaaaaaactgttagaacaaataaattcagaaaaggcaggatacaaaaatcagttgcatttctatacactaacaaggaactgtctgaaaaggaaattagaaaaacaattccattgacaatagcacaaaaaggaataaaagaaaacagggataaagctagctgaggaggtgagtaccctacatattgaaagccacaaaacaatgatgaaagaaattaaagaagatacaaatggaaagacatgtatgttcatagagtgaaaggtctaatattattaaaatgttcatactacccaaactgatctacagattcaatgcaatctctaccaaaatctcagtggcatttgttgtagaaatagaaaaaaataatatcgcaattcaaatggaatctcaaagaaccccaaagagtgaaaataatcttgagaaagaacaaagctggaggcatcacacttcctggctttgatatattacaaagctaccataatcaaaacagtatggtattggcataggataaacatttaggccaatggaacagagtaaagagcccagaaataaatccacccatatatggtcaattgatcttcaacaaggtttccaatactacactttcgaaaaaggctaatctcttcaacaaatgatgtggggaaaccagatatccacatgcaaaagaatgaagttgtatctttatcttacactatacaaaaataaaacaaaataaaatggattaaagacttaaatgtaatacctgaaactataaaggtcctacaaggaaacacagaggggaaagctttgtgaagtgggtcttggcaattatttcatgggtagacaacaaaaacacagattacaaatcaaaaataaacaggcggattacataaaattaagaagcttctgcacagcaaagaaaaaggcaacctatagaatgggagaaagtatttgtaaatcatctatctgatgaggggttaatatccagaatatatataaaaaaactcctacaactaaacataaaaaaaccctaattttaaaatggacaaaagacttgaatagaaacatctccaaaaaagacatacaaatggctaacaggtatatgaaaaaatgctccatggcactaattatttgagaaatgcaaatcaaaaccacaacgagatattgcttatacctgttaggatggctgttactaaaaaaaaaaaaaaaaaaaaaaaagacaacaagtattggtgagggcgtagagaaattggaacccttgtatactgttggtgggaattcaaaatgttacagccactatggaaaatagtatggatgttcctcaaaacataaaactataactaccatatggcccagcaactccacttttggatatttatacaaaagaattgaaatcaggatcttgaagagagagtaacacacccatgtttactgcagcaccatccacaatagctaagatgtggcaacaacctaaaaatgttaatcggcagatgaatggataaagaaaatgtggtatgtgcataccattgaagacaattcagccttaaaagagaaagacattctacaagatgtgacagtatggataaatcttgaggacattttgctaggtaaaataagccagtcacaaaaagacaaaactccattattccatttacatgaagtatctaaaatagtctaattcatggaatcaaagagtgcagtggtgattgtcagaggctggatggaagggaaaatgggagaaactaaagtttcagttaagcaaggtaaataatatctagagatacgctgtgcaacattgaactcacagtcaacaacaatgtattgtacacttaaaactttgttaggagggtgggtctcatgttttcttaccacaataaaataaaatatttttaaaagtgacatatagggcactgtacctgatgactcatctagcataaacgtcatgttttcatttcctgagaggatgctgtatgttacttttccattccttccttcgtctggatcgtgagcagttatgtggtggaccaaggagcccactgtgacatcctctttgacatgggcattggggaaagaaataaaagtggggttgtggtcatttacatccaaaatcactatttgtgctgtcagtgatctcagtcgccggtctgtcacattcacagcctgatcagatgctgttactgtcaggatgacagttggaatgctttctctgtcaagacgggacacagtgactagtgtgccaaatgaggggtggatgagaaatggattcgtgccagggttgtgggattcaatgtagtattgtattctactgttcaaaaaactgccgtcatcatctttggcattgaagacatacaccagggttcctatgggaacattctcctctacactgatcacaatgagctcatcctggaaagatggggaatggtcattctgatcttccacatcgatactaaggaagactgtgctactcagggaaaggtttttgctatggtctgtagtaatcactctgaaaagataatgagatgtcgtctcataatcaagttccttagaaagaaacaagtctccggttgagctgtctatttcaaagtgtccatccttatcatctgcaacaatactaaaatgtaactttccattataatgttgttgaaggtgatcagatgactttatcaagctcattatttttgtgggcttcaaattttctggtataattaaatgtctaatattctgagacatgattgctctccctttggatagtgggatcacctgaaatacgaataaaagagatattaatttggggtatttttaaaacagtttaatgaataaatgtaataatattattttgaaagcaaattccttccatgtatgtgatcatatgttaattagtgagaaaaatgtcatttttatattatataattccagtatgtctcagaagatcaaaaactgcataatatttaggagataacagctacagaattttctatttcccagtttgctgtattgtgtgaaacaacagtttggtaaagccatgttatagttaagctgaactgtagccttgtgattcttcaatgggaatgcagggtagctagttctccagattattttaaatactacagactgatctatccataatgacaacatctgtgtacatttaagtatcatatgtctttgtttgtctgaaacaagaaactggaggtatgaccatacagatttttctcttaacccacatacccttaagcagtaaagaatataatttggaaacagagttcttgtggatatatatccttggttattgtatatacctgtattaatatttctgattatcacatgcacacacaaagaaactatgcacagtcatctttctttgagtggttggtgtaatttttttcttactatggagacttctcacaacttgtttgcccattatgattaaagtaaagccttaaaatatgaatctggagttacttttctaaattaaaaaaattacaaaaatctatgtcatttattatatggccatttgtttacatacaagtgtctcctgcaaatttaccagagccttgacattagaaataagcacaagaaaagataccttttgtccattataaacaaagcaacataaatgccaatatagtgatgattatcttgtcaagaactgtacaaagctaatttgcaaaataatttgggtctaaatcatttttctagtgatagcaaaaagctaagtatgctatgtgcaatgctctcaaaatagtattcatgtaacatacatacatattcatatacatacatattacatgtatcttcactctataaacttgtaatgaaagtcaaatgaaatctttagatgtccttccatattttatggtgacaacattacctgaatattaacaactgcctgtccttgaagaggaggcactccctggtcagtggcaatgacactcattctgtaggaaggtctataatcatacgaaagtattgtggttgttcttatttcaccattgttggcgtcaatcttaaagtgatcagaactatcttctacacacacaagaaaattaagaaatgaatgttaattgacaatgcagaaaacagaaaatcaattaatccaatatatcgatcatttggaagatttgtttgctttgaattctatgagagtatgaacacaaaaatgacactaaaaatagacaagaaacatcactttttaaaaatttttattatggaaaatgcatacaaaaaagtggacaaaatggtataataaactttcacgagtccatcacctagcttcaacaatgatcagctcatggccaatcttatttcatctattccccatgtatatacttcgcttctcccattttttttgaagtaagttccagaagtcatattatttcttctgtatatatttcaaaatgcatctttaaaaaataaatattttaacacaatcatcacagtaccatattataccttaaaaattaataatggttcacagtatcaccaaatattcagtaagttttcaaattttcaaccatcccataaatactctttatttttcttgtttacattaagatcaaaataaagtccatatattgcatatttctttaatctatggattcctgccacccatctctctatttgtccttgcaatttatttgttgaataaactggaacttgtatcctgacattttccatgatctagatttgctgttgcatctccaacgtgtagcataatatgttcctctattcttatgttttccttaaattgggaggcagatctagagaactgaccagattcaggtcaggattttgtttgtttgtttgtttgtttgttttttgcacgactgcttcccaaatgctgtttttcccttcagaggcataggtctagctgccaaaaaaaaaaaaaaagatgaagtctctttctgttacccaggctggagcgcaattgtgccatgatagctcactgcagcctggagttcagggtcgcaagctatcctcacaccttggcctcccagatagctgggactacaggcatgggccaaaagctagttatttttgatgttggccccccactgatgcacagcctagatccattaattattctttaagttttgtgaagtataatgcaagttgacatcccaaatccaaaaaatatgagatccaaaatattccaaaatccaaaactttttgagtactgacatgatgctacaacaagaaaaactctacgcctgattcatctgatggattgcagtcaaaacacagtcaaaactttgtttcatgcacaaagttataaaaaatattgtataaaattaccttcaggctatgcatatagatgtatataaaaaatgaatttcatgtttagacttgggtctcatccccaagatatctcaatatgtatatgcaaatatccctccccccaaaaaaaacccaccaaaaaaaaaaatccaaaagctgaaacacttctggtcccaagcattttagattaaggatactcaatatgcactgcattctggtttatcatccctttttcatgtattagctggaatatttcaataaatagaaactttcagaggagttcattataagaaaggcaggataaatgctcgatgagttaaacttttatttaacagtttttgaaataatgggttggttcactaacatccaccaatgttccaactatgataagtaaaattttgtcttgcttttgttttggaaatcgttaagcatgatttaaacatattagttgtatttcaatatattgccatttttatccttattgatgctcaaactgtcccatcaccaaacattgggatcttcttaaagttggttcccgggtctctttccatgatcctaatagtgtttagtagcctccttgtaactggtatgacaaaatggtgcagactcatcttgtagatttcctgaccatgacctgacatcatcatttctccaaggactcctggttcctttggtggaaaatggttttgggagaacatatttgggacattagaggtgctcatcgtttctgggtttgtcatcacttctaggccttttcagtgcacggagaatacacatgcacacatctatacattcatattgatgcttataatttagattggtatcataaggttttgagttaaataacagatttgtattcttcaataaaatctgaacatttcaaacagttcaaacctcagacaagtcttgagtagaagctcccctccattctttagttcaacagttgctgagtcattactatggaccaaataccttatcagtttttagggacataaaagcaaataaaaaagaacccctgtcttcaagaaactcatagcatggagcaggcaattatgtaacatttattagttgtgatttctatgctttaatccattgattttgttctcacagaaatactatagaatgcattcatgaatatgatacatacctttattccccttataccaattttcatctcattattttaccatatattttgtagttgcttctattttactatcagataaaaaataaagatgggaataatgtaatatatatctccatatttttgtattgacatgcctcaattatcatttaaaagctaatttataaaaaaagaatatttcgatgaacaccaaagtatcacttcttagactgattaattttcaatattttttcaattttttccaagaaatggcagagtatgaataaaggagtggatctgtatatagctccaaatctcattcccctcctttttccccgtagaaagtcacttttataactgaagttgaggtttatctttgaagtccatacatccataaataacatatgccatggctttgcttgcttttaaatagtggtattatagcaggattatagccgtgtgtgtgtgtgtgtgtgtgtgtgtgtgtgtgtgtgtgtgtgtattttccctcttcacaatcattgtccttcacaggtacactatgttgtcttctccaccccaaaataagacaggaaaaaaagatataaagatcttattgacctaactgacctcatagccagagaaagattcttgaatgcatacctgcaaagccagtttttctcccacccaaggaccagattaaaataagctaagacaacaaaaagagaaatttgagaagtaacaaaagggaagacaaaaaaagagggggagaatggggaaagagtctctgaaggaggggacagcaggaacacagaggaagggctgtctccaaatgtggatctgctgcaggctcactacctctgtataatccaccattcaagtgtcctgagaacttgggaagacatttataggtaaataagttcggatggtttatatgggcatagaaacatcagagaagaatttggctccctgaccatggaggtattgagaagaactgcatatgtaacttttccaaggaaaagcaatgcaatgaactcaaagctgctgtttgcgtcaaattctttttatcttctgtaaaatccttgccttccttgcttaactttggattcaatatttatccacactgccatgtatgaaattctattgtattcattttcattgctgtatagtattccgtgaatataccatattatgcagacaactgaaacaatgcttcaatgaatatcctgttacagtctcactctgcacatatagagttcctctagggtaacagaagtagaactgcaagggtatagcataagcacatctccagtcttatcagatattgcttcattgttcttcgaagtcgtcacaacaaggagtctgggcatgctttaaaaacctttttaattattcaggcttcttttctttgagttgtctgttaacattctttgtccaattttattatttatttactggtttttcttactggtttgcaggagttcttaataaattctgaatactaattttgtattggttactggactataattatcttttcccaacttgtgacttgaatagtcacattgtaaacaatggcatattttgtagtgttttcaattttcatttagttttatttatctatttctttgtgagcttctgcatttcttcttgtttaaaccgtcttctttattctcaatgccatatatataaccagtctcatattttcttttgtaagagttaaagatttctacatttaataagactcatctttgatatgctgagagtagagatatttttccttgtaggtaaccgatcatatcagcatcacgtattgatagtccatcttttccccatttattttctaccccctcatatgtcaagtttccgtacgtgtaaagtgtgacccctactctttttaactggcccatttattaatgagtgaatcaatacaatagtgttttaattatgaaattttataaattaagactgggtaaggccaacttcccacttgttatttggacattgtcttagttattccttgtcttttgcttttccacatgatgtttagaatcagcttgtcaaattctatcaaagcctcattgaacatttgattgaaatcatactgaattaataatgatatttttgttaagaattgtaatctttaggatattgagtcttcccaagcatgaacatgatacagcttttcatttcattcttttatgtccttcattaatattttatatttttctgtatgaaagtcttatacaagttatattggaattttttctatgcccctaatagagacagatcctatctgtgttgttttgaagtttgtacagtttgagaggcactccttaagaaaaataaattgtccacttcccgctccctggggaggctatgcaagtaaaacaccgcaaaacttagcttcattagtttcacagtagatctgctcctaccccctttcattttctttgtgaattcaccatagtgaatgagatctttggaaactgctaagttttaaaaataccagtgagtttcgtatgttgacattattctcagaaaattggctattttattaattccaatgggttgcctatagcatctcttgggttttccatgcagacaatcaaactatctgtgggaaagggcaatgttatctcttctttcctatgtcctatgtttgtgtcaaacatgacaaagcaccaaatgtcttttaaaattatataaaacacaatgccaattaaagtaaataactggaaaaaatctggggcctgcatgttccaacagaaaacataatagtaagcccacttcaataaaatttccccatacacacacgcatgtatacatgtgacattttctaggcatgatttactctgaccttacaagtattcagtcttcataaagatttatagatgcttggaactcttagtcatacttaataccaattcttatcccctaactaacactttcctatcaataaaagtaaatttgtacttcacattattgcaaattactcactaaagatgaatggtttctattaagaacgtaaaaagctactctgattttttattaaactttaaattacttttcaaaaactgaaagtagttcttgacaatagcaaatgtattttgtttgtaacttggtgctttttcaaaactaactacagcattcaaagtaatcaaaatagaacttcttttcccagaaggggatagttgataaatgaaagcagaaatcctaaaagttcttaatcccgtatgaacagtaagttttacctgaagatactgagtatgtaacttctgcattatttccttcatcaggatcctttgcaaacacagttgtaaccaacatatttactggttgaccttccagaacctgccattaaaacaaacagcttacaaatgagtcagcaaaagtttaaaaagaaatatcagtggacctttaaatgaatgaatacattatactaaacattttaaactatcttaaaatccacatataattcaaatgcataccatgtaaaagttatatgggtgtatgtccatgaaaagaatcctccttacatattaaatcttttattcaattagaatgaattatctgaggcatctgaactaattctgaccaaaagaaaaagaaattgaacttgctaaacaatcttagatttttggtgtattttaagatttctagcatattctcattcatcatctcttaggacattttttgaaaggtggttgctatggcttaaaatatgcttaaaataagtatgaacctttaattcagaaaacaaaactcatgcaggacataccaattatcaggagctgtcctgcaatgttgaaatgcacatgtgaagttcaactacatgtttagagtccaactgcccaattaagccacaggacattttaatgatatgattaaaaagtgtaatgatgatataataatattttgctttgttagaatttttctttaaagctggattcagatcagtttaaagttatgagttcctcaatacttttgttgagttgttcaatatgtatatttgagcacaatttgaatgtctaattcaattgttctggaacagtagcttctaaacttttcattattataacccatccactaaaaaaattattagtaggtccaaacatatttattaattatgtgaatgaactgatattctaatttattatgtatattatacaacatacaaaaagacaaatgaaaaagatgagataatataaatataattgccagttggtgcatgtgatcaaaaggatcaacttttactatctctggatttccacctacccactttagagctacaggttgttcccctacccttaagtaactatcttagagacatgtatcaattgccgttaagaagctctgcacaaagagatgcacgtaaactactggaaaaacaagccatgtctgagcattaacctgaagcaccattcagtttgtgtacaaggggctgaactaaacttattgttataaagcaactggaggtacaatgccaaagagcacatatattcatttactttttaaaaattttcttttaaaataacatgtgcacagtatctaggtcttctagaaaaagtatgctttgccacaccaagactgatgtgataaattcacaggttttaccacaagatggtgctcaaaacaaatgacttaagatattacaaattcattgcaaggtttcttcacaaaccttcacgtgtaactcctttccagggagacactgggggaagaagggcctgttatcattgatgtcagtaactgagacgtaaaccgccatggtggcgtttcgtggtggggagccgcggtctgtcactagcacagtcatctcatggtgcccccggtgctcacgatccagtgccacccaattgattaactctcctgcagagtacagagcagaacaagacacaggcactgtgtaccaggcgcaccagggccagaaccatttccagaaggaaaaccaagtacaaagctttgagcaaatatgcgacttctaagaccatctacatagtagtttggctctatggtactgttgaaaaaattttctcaagttgctcctgaaaatgtcactttaaatttgttattctttgtatttcaaattatcatccatcgatcatttgaactaataaacaatgaattcataaaaatgataaaactccgtgggaacttagtaatgatttggaagatttaaaactgctgcttatccctctttatgctgctatacagaatgatggaaagcatgtgagctctgacacaggttctggctttggccccagtttccccatctcagacatggaatgactcctctgagcctgggactgctgtcaggaagaaatgtaatcacacatttaaaagtattgtgcaagctatacatgacgacacaagtggaagctgttattactactttaacataatggctaaatacctttctggaaatcaaataatatcccttaggcaatagttcttgttttatgcacacaagtatttgttttttatctcacaaaatatacatgtagcagtggatagtgacttcctataaaaactcttaatgctttagaagctttatttcaaatatttctgcctagagctatactaccttcagtaactttcctcatgtgtcagccatgcagacccaggcataacatctaagtgcctcttcctattgccagggaccttgggaagacaagcactcggtccaatagcctgtcagagctctgccaagcattgatttcctcaccatttatgaaaaaaaaatgtacctgtgagaatgtgagcatgaagcagctaccgacaaacatttctgtggctaaaaacttttttcctcttaatacaaataaaatagcattgcattaaaaaaaagtggaaacagggaacaaaaatgaaaattctcatttaggtaagttgctgaattggtgagcttaaatgcagtgtttatgataactgtttactgttaatatataaactatatttatagtgtttactcggtggttttaatatagatcatacacacaattgctttttttaaattccaaactataattctcctccgaagaccttaacttctgaatggcaaacagatttttattcataaagcaaatctgatggataagcagcagccttggaggtcggggatgtaaaagactgtgcagctcaggctgcagctggggatgggcgacaccaggatatggttccacaggagctcaagtcctggtcacttgtaggactgtccagagaactggatgaaaagggggtgtgtctcccaggctctgaaggacaccctccaccctgccttgccatgctgtccttgggaggaggaacagtttacaagcacgtagtgttccaagccctttcatattctttagctctttacccctcaaagcatggcacagggcgtgtcaggaattgtctcctgtattcatggtaaggaagcagctctgagcttaagctacttgcttaaagccatacaatgaaattaggaatggacacctcgttttcttgtaggggagggaagatcacgggggaatcaactgtagtttgcttattttaaagaaaaaaacaagtgaaatagaagaccttgaaaactagccatatggaagtaaagtgcaagcagggtcatcccatatagctgtatggtttgtgcccttgcagcaggagtctcagtttagggagtgaatgagagtggaaaggcagcttgcaaccttcttggcaagccatgtgccctgtgaaaaccctccatctgctgtgaaaggtcaccttctcctaattcacagaacagagacttgagaacaaaggcttgaagttcatcagaactgaatgcaaagtctgtcccactaaaggcagcagcaccatctgcccaggttatgacatagatggtgcctgctggacctgcacaaaaagggagcttcttctcatcttaccagctccatgactttgggtgtactactcgagctatctgagtttcagttttcccgggtatgtatttgcagtatagatatgtttcattgtaaggattaaataaactccccgtaaacttatacaacataaattttaaaatatagtgacttttaatctttaatttcttaattcagactttaaaaatttcactgtaattattcccccttttcctctggttcccctgtcagaatgagaaaaaggatatatattcttagagtgattttgaaatcttaaccaatgaattgatgtctagctttacattgatgatatttatatttcacaaaatacgttttgacgttttttaaatgtctacaaatggaaaaggatggttgttgaaaaaattagcctttacacaaggatatattcaatccagttctgactatacctctagttcagaaaaagaaccatatattggcaagatggggatgtgatgcagggaaagtatgaattattatgggtgaaactctattcaatttttaatccatttttaagacctcacaatagagtaatcgaataccttatttattaaaaaccattatttcaattgcatgtatgcactaatgctatacctaacgacttgagttttctcaatcctgattttgtttaattttttatttttatttttacttaaagacgagtgtgatagtactgaaccctcattttaaaggaataggtggaaactatgaagtgctacctgtattaggattcatcttgaagaattttccatcagacaaaaggaaatataatagctgtccattctttccagagtccatgtcaatagctgtaattttgcctattaccccttggggaacagggctctcttcgactttcaaaaacaacacatcatgcaagaaggtgggggaattgtcattctcatcccagacacgaacaatgactgtagtgctcacattttgcaagaatccgtcctcggggatccaagcaaacactctaaaattatatgtttgggtggattcatagtcaaactgtcgccgcaaataaatccagcccgtgtaagggcggattccaaacatagcagagtctacgctgggttccagcgagtacctaagaggcgaggctgcacgctgggggccaagtgggtgcgcctgtgtttgcagcatttgtgtcatcggtgagagagactcactgacttccacttgatagaccaaatgttcgaaagtccaggatgggctgtgttcgcgtttctcgataacgactgtcagcaccagcagggctgcctgaggatgcacgccttggtcctcggccctgagagtcagcgtgagctcccgctgctcgcccgcgcccaggctgccgttgaggaacagcacccccagggctctgtcgatggcaaagacgcctggctgcgggctggcgatggagtaccggatgagtccgttccgcccactgtctctgtcttccgcacgtgcgaggtacaaggctgtgccagggggcgtggtctgggatattctaatctcatccgaggtcctgaggaacgctgggtggttgtcattgacatccatgactgttatgttgacctcggtgctgctgcaggctggggcgctgccgagctgcgcctgcaccgtgagcacaaccacgggctgcgtctcgtgatccaggggcttccgggtgcgaatagtgcccagccgcgggtgaatggagaactttccgccgagatcaccagaagaaatcctgtaaaagattggttctgaggagtctgaaaaagagagaggggacaaccactgtatgtcaaaagggtggacccactggaaactcagaaattgaaatgttaatacagtcatccactgcctaatgacacttcagtcaatgatggatcacatatactatgatggttccgtaagattctgacaccgtattttattgtaccttttctgtgctcacatacataaatccttaccattggggtacaactgcctacagtattaagtgcagtaatatgctgtgcaggtttgtagcctaggagcaatcgactgtaacatttagcctaggtgtctggtaggccacaccatccaggttcgtgtgagtacactctgtgatgtctgcacactgacaaaattttctaatgaggcatttctcaaaacatttcccatcgttaaggacgcatgattgtatattctccatctacagagactgctgtgcaatgtcttactttctccactctccaaagcctgcggaaaagtggacacacggttttaagaatttttttggtgtacgaaaagaatgtccaatgggcaaagagcaagccacaggtttcactctcttccttcatccctcttgcattagataaaagggaaagatattcagaaaataattcaaatacctttttttaaatatatttgaggaagtcaagttcaatttatgttgatgttactctattatatctacctatgaagggcaaatactctccatagagattgagggaagggagagaggaaggaacaggaggggactaggaggaggacaagctctttggaaaggtaattcatttctaggaatttatcctgcagaggttcctctacaggtgtgaaaaagtcacacacggctatttgctcaagtactatttggactagcaagattttttaaatccttcaaattggtagcaaatgtaaacataaaacatatctaagttgaaacactataaactgtcttttaaggaaacagaatggcatccatttatctggaaagttgttcagtatatactaagtggggaaagaagctctataacaacaaatatagaaagatgcatttttgtcaaaaatttgtaaattgtgtgtacatgtgtgtgtttttgtgagtgggttataggagacatatattttgtatattataatctgtattattttaaacattctttttaaaatgcctattatttttgtgatcagaaaaaaaattgtgggatggacagaaacaatgttggaagaacaaagagcaagccacagtttgtgttatctcccttgttttgacttgcgtggaaagaagaaaaaaattattcaagattgtaccgcctacaaaaaaacaagaaatgttccaataatggaattccatgcagcataagaaataagtacttactcaagggctctcttgctttcactgttccaatgggactatcttcaggcacatcttcataaactaagaaagtgtacttaggcctttcaaactcagcaggtgccagagttgtctggaaaatgtgtatggtgacatcggcattaatgacagctgtgagcccaccaccgtcttgagcagagaccatcaacgaaagtgtggtagattccaaatgactaagaggtaatgttaagtaaataattcctgggtagggaaaagaaaacattggtaaacagataacatgtaataaatactgatgagcaatagtaacacctggtctattaagtgtattgtgatgttttattttatgtgttaactgggccacaggatgtccaggcatttgatcaaacattattttgagtgtgtctgtgagggtgcttttggatgacattaacatttaaatctgtagactgaataaagcagatcatcctccctaatgtgggcaggcctggtccaatccactgaaggcctgaatagaacaaaaaagctgactaagagagaatggctcctgctcccaacctggggcactggtttttctccagccttcaggctcagatagaagcattggctcttcctaggtctcgagcctgctggtcttcagcctcaaactatacgactggctctcctggttctcaggtctttggactgagactgaagcaacactgccagctctcctggctcagtttgatggatctgctcaccctgcagatcttgggacttgccagccttcataatcacatgagccaattccttgtgatcagtctcctcatacatacacacacacacacacatacatcctgttgggtctgttctctggagatgaactgatacatgtatttgccaaccaaagaccttctgcatatttgcaaaacaatgtcaaattatgttaggtaagcaatattttcctagagttaaaacattagacattttagaagtatataaagtcactagaaaaaatataaattgtgttgtcttctttagggcttaccatatcaccagcccgagatgacagaagatcagattatatcccatagtccagtatattctaatgcaggctagcgcagggttgtagggtgattacaacctgctcaagtgccagaatcccaagtctacaggatgaaactaaaattttatcttctaaggtatttgacatttgccctgaactagaccgtgtagggtagctctctttttaaactgactccactccacctttgttggtgagaagatataatacaatagctgtgtacaataaaacttcagcaaatgtaaagacaatggggacaagagtgacgacttaggcttatgcatgtagagtatgtgagaggagaacttatttatggctaagttgggaagagattcggtaatactgacaaaaatgaattatttaatattattaatactaccacttagtgtactagtttaaaaacctgaaaacggatctaatgcaatcaacttaagaaatgaacctgttagttttgtttaatgagaaaaatgtatgcaaacttattaaatgaatttgcgaacaaatacgtatggctggcctttatggaattcatcatgtacaactggccataacaattagttaatgaatgaatactgcagtctttgccagtttaggagaagttggcaaaaacatcagggatatcagtttctaggcattaaaaggtgacatccatttgatttcttccttttttatataaaaatctgccctcttgcaacttcgatttcttgtttctatttctattagaaatttaataaaatattcttatttactgaaatcaaatatcttgcttggcctgctctaaacacatactcattttccttttttccccagctttattaaggtatagttgaccaataaaattacatatgtttaaggtgtacaatttgacaatttgtgattataaccattttctttaatgattccttatctaatatgattttaagtcatttctctcacagttctttctcctaaacatggtccaagttgatcatctcaattttgataaccaaagtgaacaaactttgtttccagatacaattttactgttataaagcagaggataaacactctttattagaataccataaaatactaatgtaaccaactattagtacaccagcttttagtaaccatattcacatctggtttcagactgatttgatggtccatcaaagcactcagtacttatcacaaaaaatttccaagtcagatctttctcatctgttattggtgcagtttctaaaaaatattgctttagtattaaagtctctgattgattgaaaaataaaacttgaatatacacaaatgtgtacagaagagaagaaaaagtccccctaccccaaacatccccactcaccaggtatatattcttccagagctaccactaaattccgattacagagaaattttaaaagattttatgttgagccctgatgattatgacaatgaaaaacttaatgtctgcctcaacacaacctggtcttcctgcatcccgactgactccttctgaactatttttatatttgtgttagaccagtcttcttgaaatccaaatctagacacatcgatggctccccagcttttcagggtaaagcttaaatgcattatcttaacataccaagctattcataaatggcccctctccctctctgtaaccccatctcatagctctctgtgtcatagctctctgtacagtaccttttgctctaggcaaagtgaacagcttgtaatttccagaaaagaccttgctgtcttccatctggattgctgcgtcctcttcccagaacaacttcttcatcttctttgatgtaacaatttctagccatattttattattattattattattattattgagatgaagtttcactctgttgcccaggttggagtacagtggcatgatctcagctcactgtgacctccgcctcctgggttcaagcgattcttctgcctcagcctcccgagtagctgggattacaggcacgtatcaccatgcccggctaatttttgtatctttagtagagccagggtttcaccatgttggccagcctggtctcgaactcctgacgtgatttgcctacctcggcctcccaaagtactgggattataggtgtgagccactgcacttggcctctagtcatattttaaaacacagctcaggtttcatctggtgcagctggccttctctttctctccacttagctctagctaccactattctatgatcccgcagcagcctgggtacatgtgcctattatgaacttaacatgccttacttaattaccggtttttaatattttatatcagtccttcatttactcattagtttactgaatgatttataaataaaattaaaagaaattttgaaaatatacaaacaacaatttactatacataaggagaagagagatctgtaaacaaaatggaaaataactgaaagttagattagcagtggataaggacaggtagtttagataagaaacaataaaatgttgataaatataatactacctaaaatcactaataataatgaaaatacaaaattaaaaccactacctcatttttacctctctgttttcctaaaatatttaagtgataatacccagagttaatagcaggttgttatttatgtacattctccaaaaggcactttggtgatacttatcaaaattttaattgttcacactcaataactcagaaatctactctatatttgtgtaagtacacagaaataaatcaagaggatgtcatttggaacactgaaaatgaccttaatatccatcaggaaaagaatggacagtgcactctattgtggtatatcaatacaatagaatactgtgtagcatcaaaatgaagtaaatatacatgttttcatctagaaagactttacacactacattttatgtgaaaaacaagttgcaaacgtgagtctatgttatcaatccattgtgcttgaaaaaataatgtcaatactacaagtattagccaggattctccagagaagcaaaccaatgggatctctcctctgtagatatagatatctatagatcttatatctctcatatctacatatagagatagatagatagacattaatagatagatataaagtgagatttacattaaggaattggctgagattatgaagtctgagaagtcccatgttcacccatctgcaagctggagacatagaaaagctgatggtatagtttgaaagcctgagagccaggtagtcagtggtgtagattctagtcagggtctgatggcctgagagccaggagcactgagggcaagagactgatgtctcagctcaagctgttaggcagagagcaaattcaaccttcctccacctttttgttctttttcaggccctcagtgaattagatgatgctcacccattctagggctggccatctgctttacgcagttcaccaattcaaatgaaaatccacccacagagacacccagaaacagtgtttaatcagctatctgggcatcttgtggactattcaagttaacacataaaagtaataatcacatgaacaaacttttttttttttttttgagatggagtctcactctgttgcccaggctggagtgcagtggcgtgatctcggctcactgcaacctctgcctcctggattcaagcgattctcccgcctcagcctcctgagtagctaggactacaggcgcctaccatcacgcctagctaatttttgtatttttagtagagaggggtttcaccatattggccaggctggtctcaaactcctgaccttgtgatccgcccatctcggcctcccagagtgctgggattacaggtgtgagcgaccgcgcccagccaaacatttttaaaatcatggtatatctctatttaatgtaaaagaaaaattcatgaaaacctgctgagaatatttgattacagaacactatgtaaagtttgaatacaaacactaatacatatacgatgtgtatacacacagaactatgcatactgaaaaatatgaaaggataggaactgttaagggaagtcatctttgtgtgttgagattatgggaagctcactttttacttcttacattcctatagtttaaaaattttttaataattatatgttaactttgtaaatgaaaaaatatattttaaagatattcagaaaaagaagatatgtttggttattatttaacttttttaggactatgaaggaaacttgtaaactatagtgtaaactaagattggacattaaaatgtgggcctctaaaaataattgcagagcacacttccttaaaaataggattctaattctacaaaaaatttcaagaatgaatatcatggatatttcagaaccattaaatgaagatattaaagggattaatttccattaaatcaatccctgaggttataataaacaaactctggagaagctgtctatataaagccgaacatgaaaaataatgtttcaaatattcaaattactaaagtgtgtcctagtaacatacagcaaatgtgaagtctaataaaattaatatctatactatattcactctggtactgaaaaatattctctctgatagaactatttggtgtctaattatagcccctccaaatccccaaactggcatttttaattgagacagtttaataatagtttttgaggttcccgatgatttgacaatggggagcaagaagcaacacatcacttattttatccttgataccacctggaatgttagtccatgaagcaaaattaagtttactgtcttaacaaaattttactgatgaatgtccattttatttgccatattatgagttatcaaataaatttgaaggaaaggaaaagggaagaaaaagggagacatgacatcaattatagagagttatacaaatgtaaccttttcaagaatctttacccttaaagaatttatacaagccaatcagtaactaagtgtaacgtcaacaaagacaaataagagctgtcagttataggtgagcaggagataacgaaatttaaagttgtatgtaaacagtgaaacatcacacaaatgttagctattatgaagagggcttagcttagaaccttgcatatggtagccactcaaagaaatgaatttatgtggggggagaatcgtgaaccttacttctcaaagggaagtgccttgttaataatttgaaaaaacgttttcgcccgggcgcggtggctcacgcttgtaatcccagcactctgggaggccgaggcgggtggatcacgaggtcaggagatggagaccatcctggctaacacagtgaaactccgtctctcctaaaaatacaaaaaaattagccgggcgtggtggcgggcgcctgcagacccagctatttgggaggctgaggcaggagaatggcgtgaacccgggaagtggaggctgcagtgagccgagaccgcgccactgcactccagcctgagagacagagcgagactctgtctcaaaaaaaaaaaaaaaaaagagaacgttttcaagtatttcaaaacaccgctctataagcacctaaccatacaaggtaaatctctgaaatctcagttttccgctaggttttaaaaagaaaatgcctgttatcatattcctccatttttcatttcatagaagtcttagaagtagagaccatcactctatatactgtatatgtatcgtaatgcatacattcatatatatacacatacattcatatatatatacacacacatatctatctatatataatatgctgatctatcaaaaattcctgtgtagtaatgggattataaatattgtgtgaacaaaaaacctgtccatcaattactaggctctaagtaatttttcaataacatcagaagctccactgttttctgtgcgtatccataggctaatcacttaaacctaccatggttttaccttaatctcccaggtaatatcagacagaagtatttcctgtctgaaagtgctgaatccttgggttaattatttccagaagcccaaaagtttagtctttttaattttatttttttaattaaatgaaagcattatactcaactaaatataaccatcaaaagaaatcaacacaattggtaaattcacttgtctttgaacttgaagggctctagaggtactgtgggctttattccagaccactgcaataaagccaatactgcaaaaaaaagtgagacacagaaattttttgattttccagtgcataaaaagttatgtttacactatgttgtagcctattcagtgtgcaataacagtaagtctaaagaaaacaatgtatataccttaatttaaaaatattttattggtaaaaaaaaaagtgttaacagtcatttgagattttagtgagtggtaatcttcttgctggtggaggggcttgcctcaatgtagatgggtactaactggtcagtgtggtggttactgaaggtggcggtggctgtggcaatttcttaaaataagacaacaaggaaggttgccacattgattgactcttccttccacaaaatatttttttctgtagcatgcaatgctatttgctaatagtttatccacattagaacttctttaaaattggagccaatcctcctaggccctactgatgatttatcaactaagtatatggaatattctaaatcctttgttgtcatttcaacaatgttcacatcttccccaggagtagattccatctcaagaaaccattttctttgctcatccaaaaaagcaattcctcattagtttaagtgttatcatgagattgcagcaattctgtcacatcttcaggctccacttctaattctatgtctcttgctatttttaccacttcactgaagtggtgattccctcaaagtcatctgtgagggttggagtcaacttcttccaaactcctatgttaacctccctccatgaatcacaaatgttcttaatggcatctagaatggtgcatcctttccagaaagttttcaatgtattttacccaaatatatcagaggactcactatctatggcaactatagccttaggaaatgtatttcttaaataaaatacttgaaagtcaaaattactccttgatggatgcatggattgcagaatgaatcttgtattaggaggcattaagaaaaaacctccttgtatatcttcatcagagctcttaggtagccatgtgcattgtcagtgagcagtaatgatttgaaagaattttttgtgaataataggtctcaacagtgggtttaaaatattctgtaaaccaggctgtagacagatgatatctgtaaacagataacatctgtttgtcatccaggctctgttgttccttttataaagcacagtcagagtagatacagtatatttcttaagagccctaggactttcagaatgataaattagcattgttccacttaaagtcaccagctgcattagcccctaacaagagagtcagcctgcccttttaagttctgaagccaggcattgacttctcctctctagctatgaaagtcctagatggcatcttatttcatataaggctgtttcatctacattgaaaatctattgtttagtgtaaccaccttcaccaagaatcttagctagatttgctacataccttgctgcagcttctccatcagcacttgctgcttcatcttgcacttttaggtaatggagatggcgtcttcccttaaacctcatgaaccaacctctgctagcttcaaattttttttctgcagcttcctcatctctttcaaccttcctatatttaaaaagagttaggaccttgctctggattaggctttggcttaagggaatgatgtggctgctttgatctatccagaccactcaaactttctgactcagcaatgagtctcttttgctttcttatcatttttctgttcactggagtatacttttaattcccttcaagaacttttcctttacattcacaattcggataactgtgcaagaggcctagcttttggcttatctgcacttttgtcatgccttcgtcactatgcttaatcatatctagcttttgatttaaagagagagatatgccactcttcctttcactcggacacttaaaggccattatagggttattaactgccaaatttcaacattgctgtgtcttggggattagggcagcctggggagagagagagagacgggaaacagccaatgggtggagcaatcagagcacacacaacatttatcagttatgttagcagtctttcatggccatggtttgtggcatccccaaacaattacaataataatatcaaaaattactgatcacagatcatcataacaggtataataataatgaaaaagtttgaaatgttatgagaattatcaaaatgtgacatagagacacaaagtgtccccataacactaataaatttgcttgaggagagttgccacaaaccatgaatttgtaaaaagcacactatctgtgaagcacaatgaagtggggtatgtctgtataaataggctgggcttagatctgagcatggctactaggtcatttatcagcaaatatgcatatctatacattcagtcacttccttcatttcttgaattatattcaatatatttgttttggtcagggtctaatcagggaaactgaaaccgtcctaagaattttagtggctatttaattaaagaaactgattacacaagtatgggaaagccagaagaataagaagggggtgatgaacagtaactccaagaacctgcaaccttctctagggttgcagaaacagaaggaaaaaggcagtattgctacctctatcaaaaagaggaggagggtgagccatggtgtgtcttggagccctgaggcggtgccgcagggctagcgtccacagttccgaggcatccctgtgcagctgagactcaggtgtctcagaggattagtgcagagctacgttcaaacctttaagggcagggcccaggaagtactctggtcaccatggtgtggctgctataatccaaggaggcctggtgagggcagtgctcactgtccaaaaggtcttgcgtggctgacatagctgatggtggcatttctgaggaaaatggtgcagttggtgccaaaggacttgggaggaatactaaacacagaagaaagcatgaaaaagccccttctctcctcctcctgttgtccagtttcctaccagtacctgccactggtggaacagatctgaaagtcgcctgtaacagtgtcttggggcatcagtccccgtctggctgtgccttctcccaagatgtctaggtcccagctctgcagggcctcctcgctaatgctaagttttgatgacgccaaatgtttagcttagttcccccagcctaggggtgatagttgcttccatcatatgttaatcttggtgtttccttttcgccttttctgtcttccattatccacttaaccagctgtctatactaaattatttctgttactataaatgttactgtttctgttttcctgactggctgctgactgatgctgatctaactgattctactggcctggcttgtactagttagatgtaataatcactatggcttgaagggatgtgatgtttgaccaacgtcaccttgttcacatgtcaaggttctccaagcaaataaacaagtgcatgctgggcagacaaaaactacaagtcctaattatgccacccttgcaaaacaggctcttgttattctctgcctaactcccctgttgtttccttcatgaaacctatcataacctgtggtattttctgttttcctgtttttgtttgtccccctcacaagttaaagcccatgagagcaaggactgtgtctgtctcattcaccactaccaaacagggtctggcacagtcccaggctcagaaaaggtgtttggtaattatttgttgaattaattaacaaataaacaaaccaacctggaaaaaaatcatgagatggcttgagattagtcagaattacacaaagaagagataagatgtcttagtcagtttggctgctatagcaaaagtagcatagactgggtcgctcacacttctggaggctgggaagcccaagatcatggtgccagcagaatcagtgtctggacagggctcccttcctggtttgcagacagccatcttcttgtatactcacatggcagaagaagcaagctctagtccctctcttcgtataagccactcatcccattgtggagcgccaccattatgactttatctaaacataattagctcccaaagaccctttctcctaattccatcccattaggggtgagggtttcaacatatgaattttggaggggcacaaacatgtagtccatagcagaagagtaatgtggtgtcagaactccagatcaaatatttacattattatacatctgtaaccatttatagtgtgtgctaccaaagcaagaatagacaatagaacggaacagacagcccctacaaagatgctagtctacttaagtggcagttatgatattaatgaaggaattcctctaggtcctgatgtactacatttaaaaatcagtcaactcagagagggaaaatcatcccataacaactttgtcccatgcaatgtagtttcagtgtataaaatcacttttgtgcctttggtaacatgtccttatttagtcaacatatataattatttttaatgaattatacatgaattctacctaattgcccatttaataaagaaagtcaccagatcaggtgcctatgtaagtaactgttcatgcttaaagtcgaattcctggaaccctgaaaagtcatttattgagctgcttctacttaagaccacaaaatttgtccctggccagtgggaaactatcttatgttcaaaaactatagaaaaataattcataattcctagatacccatcgaaaagtctaccccatatttaactgtactcatttgcattttaaacccatactccccctcttgatgtggagtgtttaccataacaagctgcaaactttgtgtcacaaaactggacatttaaaataccctgatttttagtgataatgtccgacttcagatttgtatgtatctaactcttgtgaacctgcttaggatgatatattaaagatacgtctgtgacagttagaagaccactttaatcaatgtgatatattcagaggatataatcattatttcagtttaaaatacgagtctccctcctgcatcagtactgcacaaacaaatgagtgacatttgtaacgtttttaatccttgccttcaaatgctatgaatgttagagttctgattctatatgctaattttatgttctcagtgctaggtttatttgggaatgattttgattaaatcttagcagaaccagacttcctacataaacctggcatcctagatattttccatatggggaacggcttcttaaaagcaaggcaagaaatctattatttagggttgatggagtaagaaaagagcatggagtcagatttttgcatcagatacagctgggttcaaatcttggttctatcaatccctagtttgatcttcagcagtttcttaagtgctctgagcttctgtttatcactttaaacagactgaagaatcagactaataccatttactgtgcagaactgctatgaggataaaattacatcgtatatataaacaaagtactgttgtactacagtatagtactacaaagtactgtagcatagtgtctgacatatactgactccttaatacaatactagttcccttccttctctcctaaggactacaaggtattagatgggtaattccatgcaccaagaaataatcaataatgaatgatttaaaaatattttggggaaagggaaagtaggaggaacttgagtagcatcaatacttcactgcaaagcatgcataggaagtccgctggaagagctgaccagtggccaatctgacctggtagcctgccaccaaggagcattttgggagaggctgtaatgacactcattccaacatgtctagcccctttacttaaatggtacagatttctggtccatagacttatctaaaccagtcctggatagatgtatattttgcatttgtcccactactgtaggtggcagactcttatagtttgcatggggtttacaatgtgttcccctaagttaatatttcaaaatcttttcaataaagctttctgattttataaagctggatactgacacaagttggcaacagggatgtgggctgatagtccctttttgggaggcccaaatacatttccagtggacacagatggcttaactattattctctctcactttgtcatttgaaacactgatcatttgagagaatcaactctgaacaccactatttacaccaatgcaccaccaacaacagacataacactaatttaaatattcagtttaaaggaaataatttacttaaagcaaaacccaaaacccttgaagacctgaacctgacagtggtcctcacagttgcgggagtaccatggaaaggtcataaatttggcaataattgagaaaagaatcgagtattattttaagataacataattttagaaaggtaatatagtaagttggatcatgtctcaccaaatttatgtccacttggatcctcagaatatgaccttatttggaaaagggtttttgtagatataattagttaaggatctcaagaggaaattatcctggttttaagggtgccctaaatccaatgaccggtgtccacacacaaggaaggacacaagaagacacagaaaagaaggacatgcaaaaatggaaacagagatgagagtaacactgccatagaccaaggagtgccaaagatcaccaacaaacaccagaagctaagggaggttccagaagaaactaatcctgttgacaccttgatttcagacttctggcctccagaactgttagagaatgagattctgctgtctaagccacccagtgcgtggtgctttgttatggcagccctaggacatgaacaccagcaggaggcgtatggtaaggtgggaactctgaagccagactgtctcagttcacattttggttgtcactttctcattacgtttatgggctgttgatcttttttggattcatttgctcatttgtgaaatggagataaaactagttcctatatcaaaggtttggcatgacagttaaatcaggcagttaatgctcaataaatattgccaaaagacaaaatgacaacaaatttagtttaaagatcttaattggcttttatttgcaattctagagttgagaaacacctcgatgtgttccagtgagctgagcagaagtggctggctttatagacagaaaaggaaaacagaaacagggaacaaaaagtcatttcacagttactttccttgtaaaggttaaatcagatgggactttcttatcatgccagctaaaattggctcatttgggggtttggctatttattatccctctctctcctgatttcttggaaggtcaaatagacaacttcatttcagcttggtggccatgaaactttagcgtgagtgactccattttggtctggtctgttgggcctagcgcaggagctccgttcaaaccaatgacttcctataaattttatttaacaacactcattatgatttacagactgtgtttctatgtccctgtatttcaaaagcatattatttctgccttctccttacttcatgggaggatttgtgacaatggacacaaactaatatttttataaacatggtgaatatgactaaacctttgtttctattattactatcctttcatgtctacttagggttcaacaactaagggaaatcacagcctttatggtaaaactcatgcattttttgtgtgacagttgtaaccaaatgctgattcacatgatatgtatttaaacgtgttgctacgattaacagatagttgatgaatactatttaattaataaatcagaagccttattttggagttttagaaaaataaaagttagaaaatgcatagctagttccagaaataaaatacctgtgaaatgatgataaataaaaatgccttccacttcctttcatttcattctatagtcttggttctatctctgagtctggaatctgctcatttgaaattttccattgtgataaggtgagcaggtcctggctgctccacctactggtgttacttgatagaaatcatgaaacttctctcagcaactgcttcttcattggaaacataaggaaacgcgtaggctctaccttacagatctctgaggaactcagctaacaggacacaagtaaagaaagaactgtagcatgagcacatggtgactgttcaataactttctgaaaaagttgttcttatctccaagacatattaccctgaatttctttgattttaattaccttaacatgaaagctctcatcacaagccacaacttagattatacatctaacaactagcaccaaaaacaagcaaatcattggaaaatatctctgcagaaaggactacataattaaagaacaatctgtgaagatctgtagttttttttaaattttttttcaacttgaaggtgaaactgtacatctatgctttgccaactgactactttctggggctgatttgagtcatgtgcacacactggtccccagacacacaaaacagaatcaaggccttggcttacagtgacattgcatctgtaagagccatgtaaatacctgctacttggtatcttctacatcttagatatttatttttattctaaagccaacctacatatccataactgcacagcaaccatttatacatctctatatttgtgattttgatttttaggcaacacttaccatctattttttttgctatcaatctcatcacaaaaggtataatcacatgtattttgtatattggaaagtaaatttaccaatattaactttaggtagaagatgtcagaaaatccttttaatattatttttgacctttattttcaccaacagcaataggttagtgtccattaaaaagatgagctttacaaaagtgcaaggtttcaaaaattatttgagaagtcagatctcagggaaaatgcaggaaaagaagggatggccagaggttcaggaagagggacacccattggccatgccttcaagaagttcttgttctggtttgctgacatgaaagctatgtcaaggaaactgccttctagtgatgaaaagattcatttagacaatggcatttgtgacggatttgtcttatgttcagcatgaccagtgagaagcagagggatttggggaatggtggacaacaggtgggaaaaagggggcaattgaaggaaaagcttttaagtgactccaataaagtatgtaccaaaagatggtccttttgtcaggaaaatgctaataagggattacactacagactctcaatgggagtgtaaagaggagttgtgtgggcaaatttggagggggttgtagtctagaaagcatattcaaatacttgccatttttataatacagttcaaaaattgcagaaattaatgcaactgcaataaaaacattacaaaaatatttagagtggtattattactgaaaatagaaatctatagatgatataggtttagcagattgaaaaatgctgccttcataaacagtttcttctgaatagatgccttcttatttatacaatagtttttagctattcaatatatttaacctccaaatcagtgatcctcaacctttttggtaccagggaccggtttcgtggaagacaatttttccacaggacagggctggcgggggaatggtttcaggataaaagtggtccacctcagatcatcaggcattagttagattctcataaggagcacgcaacctagatctcctgcacgcacagttcataatagggttagtgctcctataagaatctaatgcttacgccgatctgacaggaggtagagctccggcggtaatgctcactcacctcccattgtgtggcctggttcccaacaggccacagaccagtaccagtcagtggcccaggggttgggaacccctgccctatgaaggcactgattgcttttaggcattttgctatttctatgaattatgtatattaggcaatttaatcacagttatagctaggtgcattcaactcacctgagtatagcatgaactaactccacacacacacagacacatgcacacacacacacacatacatacacacacagagagacttgcatacacatacaaattatgaaggactccatgtttgtccagcaataaaaggcttattattattatctgtttcattaactttttattttctatatggacttccaagaatttctggttccccgctagtgccatcaccccacaagtcaccccaacctgccagactaaatatgggatcttctctaaaccaataaggctgagataataagaagcaacagcttgctttatcctcattctctgagaagctcagccttctgggaagagatgagtagccaccccctctaatcgcagaaggtgttgaatctagaatctagttgtccttacagaaaaatcaagtgtccagataaagactcccttacctgtcttctttgtaaatgttcccaatttctggtaaatgcagagggttcctcttgggcctctttcatgggtcccaggtaatattggtaaaattaagtataaaataaaacaaacacagacagataatttatatcttacagaccgtcactgaaaggactactaaaggaaagttttgtgttctagcactagggactctgactaaccttcctcctgaaagcaagtgctccataaaatataaaaacacatcctcataaatgcttcaataaattgacaataaagaaggcaaaaagtttaagtgatgtgagaaacctagagaataagcagcatactgaatttggctttggctctcaggacattcgcaaaatcctagtgaccttaatctttccttttactgaccttgtggagctcatggagggcagaagacaagatcagagccatttgagggtaggggcagactggggatggagaatctcagaagagtttctccaataaaattaggtccacaaaggtttcagtttaagggtgaactagaaataagcttctgtatccccagtagatcgcaaataaaattgtctggcttgaaattcagtgataaataagaggtgataaaaatttcctttgagaattcctaactataaaccagattcacaccagtttttagtctgaactcacaatataggatgatgtgaaaaatttcaagccaagaagttagattaaaattgtagggagaagtatgtctctaggacactcgggcaaaagaaacacaaatacctaaataccttctaaagaaacccaccttcacccaaggattcaaagaattcctcagataaagatccaagcccacaattaaaaaaaaacacacaaaaaatcaggaaatatgtcaacatgagtgagaccaagaaccaatagcagatttaaaggaggaaagacttcagaaaagacaaacacacaaaatactctagttaaaagacaaacattatcagagtggatttcaaaataaatccaaccatatgttgtgtataagaagcacacctgaaacaaaagaatacagacagggtgaaagtgaaagacagccaactggaagtcatctccaccctcattgttccctgactcctatcatctatcagagacatgatgaccccttgctctttgtctctttcctttggttatattacagttttcttttttgccttccttaacaatcccttggacttttccagtggtccttcttcctcctcagacttctaagcattcctctagcgaagtgctacgctatttgttctattccctggagggtctcaaagggtgtcccctgactacctgcattaaaatcattttggctatttgtaaaaacagaatttcctgggcgattagccagacattctgatttttagatttgggaaaggatctaagaattgcatttttaacaagctccaccagtaattattatatactccaaagtttgaagaccttttttttattgtagtttttatttttcagacaggatctcactctgtcaccccggctagagtgcagtggtgtgatctcagctcactgcaccctccgcgtcctgggctcaagcaatccttccacctcagcctccagagtagctggtactacaggcatgtgccaccacgcccggttaacattgtatttttagtggagatagagtttcaccatgttgcccagactggcctcgaattcctgggctcaagccatccacctgcctcagcctcccaaagtgttaggattacaggtgtgagccactgcacccggcttgaagataatttaatgtattctttctttcaaaatattcatgttttcatgtttcatggctttaatagttgttaatactttattttagtattttcccctgtcctctcatctaaattacagttctgtactttaggtggcacttctaaggtatttgtcaacttgatgtcaattggaccatcaatcacattagttaaaattaagaaattatgtatagctcatcctttcattaataaatccaattcattacaactcatattcttgtcctgtaaaatatccttaagttccttttgctctgtattgctgtctctttagtacgaccctcattactttatgtatggatttttataactagtttttctattcaaatgttctagtcctacaatccatctaggacactgctgccagaataattttccttaaatatcactttcaccatatcacactgatgctaaatatcttcatatcattccttagttccttaataatcaaatttaaacttgcctgtcatgtttttgaacttcagaatccactccactcaatgtgccttcccatcatccagtagtccatactctctacgtcagacatgctgctctcctgctgtcatgaatgcatgaagcgagtatgacaacaaagcacaactcatggcaggcaatcacagagtgacttttttttttaatttatatttatgttgtgcagctagctgtttttcccccattcctaagtgaaaatttaggaagctcctatgccttccacagctgccatcaaccaattaaaattcctagttattatcagtgatgaaacagtctcaatttaatactgatattagaggtgcttgaaccagagtgactccatcttgaataggggctgggtaaaatgaggctgagacctattgggctgcattcccaggaggttaggcattcttagtcacaagatgagataggaggtcagcacaagataccagtcacaaagactctgctgataaacaggatgccataaagaagcaggccaaaacccaccaagaccaagaaggcaatgaaagcaacctatgatcatcttctctgctcattatatgctaattataatgcattagcatgctaagaggcactcccatcagctatgacagtttacaaatgccatggccacatcaggaagttactctatatagtctaaaaggaagagaaatcctcaatttggagaatttcctgcccctttcccagaaaactcagaaataatccatgccttgtttggcatataatcaagaaataaccataaaaatagccaaccagccaccctcagggctgctctgcctattttattcctttactttcttaataaacttgctttcactttactctatggacttaccctgaattcattcttgcgtgaggtccaagaaccctctcttggggtctagaccaggaccagcattccagtaacactgtcacatacataatgacattttggtcaacaacggcccatgcacttacgatggtggtcccataagattataatggagctaaaaaattcctgttacttaataatgtcataatagtcctaatgtcataatgtaatgcattactcatctgcttgtggttatgatgtaaatatacctactgcactgtcagttgtataaaagtatggcacatgcttatgtacataagtacataattaagcatatgatacttgataatgataataaatggccatattactggtttatgtatttattatatcatactttttattattttagagtgcttttctactgattgaaaaaagaagttaattgtagaacagccacagacaggtccttcaggagatatttcagaatgcattgctatcataggagatgacagctccatgtgtgttactggctctgaagaccttccagcggacaagatgtggaggtggaagacagtggtattcatgctcttgaccctgtgtaggcctaggctaatgtgtgcgtttgtgtctcatttttaattaaaaagtttaaaaagttaaaaaaaattaaaaacaaagaaaagcttatacaataaggatacaaagaaagaaaatatggttgtacaactatacaatgtgtttgtctttcaagctaagtgttactacaaaaagtcaaaaacttaaaaaaattaaagtttataaagttaaaaaattatcataagctgaggttaatttatttttgaagaaaaaatttaaagaaatttgatgtagcctaagtgtagtatttctaaagtctacagtagtgtacagtaatgtcctacatcttcacattaattcaccactcactgtctcacccagaacaccttccagtcctgcgagctttattcataatcagtgccctatacaggtgtaccattttaaatctttaatattccctttttactctacctttactatgtttagatatacaaattcttaccatagtgaaacagttgcctatagtagtcaatgcggtaacatgctgcataggtttgtagcctaggagcaataggctataccatatagcctaggtgtgtactgggctatgccatctagatttatgtaagtacactttatgatgttcacacaacaacgaaatcaccaaatgatgcatgtctcagaatgtatccccatctttgagcaatgcatgactaaaattaaatataaaggaccacataataatccaaattctaaacttacttttaagtttggaggagcacaggctacaggtcagaagtagttggcttctctctttccttatctagtagttgttttcttccttcatctttttgttaaactaaatctctgaatcatccaggattaaagcaagggagaagaggaggagagaggcccagaaatgttctttcttgacaagcgctagtaaaataatctaacatcaacgaacctttggcctgcgaagttgtttaaaactcactttctcatataggtgctttcatggcctttttggtgaatgcttctgactctggcttttttggagaaggctaacctctacttgaagtgccttagcagaggtaaaaacatctctaaactgttcattacttccttgtctgctgaaaagttgacagcactcagaatttctacctctggactatagagtcctaattagggaaaaggagccaggctggtgggagcagggaaaagcaaaaagaaaaagcaggtaagctataagtctgcctttcttcatagtccaggacacgtagcactcttgtgcaaataattcacaatctttctgagcccagctatcaccagacccttggatgagagtaaaatgcaggttagttcactgcaaccttggtgttatcagtactgcacaaagccttctttagcacatcacacaaaatccccagcaagcttttgtctccttacagtcagctcctttcttgctgacctgcccattgtacacttgcaatgtattttcatactttcttgaataatcctgcctttctttacctacaaactgtcttggtaaattcttcttactgctcatgccactggccccagatggttgctgatcacttgcagtatggccctttctggacagggcttaaaaacaactctatactagctctccctcaaaaatgatccatattcagaagaaaaacttaaatactctttgcacctacaaactcctggaatgtagtgtgtctccacttaagaaacttctcctttattctgtcagtctttcctttcttcagatttctcaggtgagaatcagacatgagcctacagttagccagcagactgcagggaatacatagtaagttctctgagtagctggtaaggtgctggtaccccattctggtacccacaaatcaacagcagctctctccaaattatcaacattttataccattgacaaggtggatctcctttgtaaatcttgcataaagtctctgtggaatgtagaatttgtatgtatcttagtttctcagtccaaacttatattttaatttctcattacaaatgcttaataatttctatcttcatgtgtgttgttttcctctctggaatctatctattctttcccaactcgcttatccaaatctgagctatcctgcaaggttgtgctcaagttccatcttatttatgctctcttgcctgactgttttagattttccagcattgtctttggaagccctacactagttgcagaagttactataatcaatacataaagtttgcccttagcatttctttttcatgaaagaaatacaggcaccttcatgagacagtgactctgtggcctacaaacttaattgtacttgaaatacaaaaatatctttgaaaaatgtgctgatccaaaaggtggcttataagtttaagaaaagtgggacaaagagaggcaaatgttaggcatggacatctaggttcattaaatttctttgaatgaacactcatcacttagaaaagaagggaagtattaggataaagcttgttgttctatattatatatgctgaatatttcaaacattcacttttttaaacatttatatataaacaggagctagaaaacctatttacttgaatctaacttttttttcaactttattgagtataactgactagtaattgtatatttgaatccaacatgcttaaataaactaagctctctattagaagttgaggggctagaaaacatgtaactcccatatttgttattaattgtttactatatataaatatgcatatatgtaatatatgtgtgtatcataattcatgttatttattaataataaataataaaatcataaataaaatgaataactctctttgcctatatattggtcagagtaaaatttatgacactatattttaatactttaaagtacagtgattatttagctcacatttttcatgacacttgcaaatggtaattaaccaccagtgcagggacaaacattaactttaaaaaacgtcattaattaacttacagagcactggttattttctattttaatgactgcttggatttatacataccaattatcatatataatgtttgtctatgctcttcaccttgtcactttttatttaaatagaggaaactgttgtaatcaaaaaatgttttgaacagatgcagtactaagtgaacttaaagatatatatatacgtacataatcatgctcttctactaactaagcaatactgactttcagaataaaatatcctggaaaatggaatttttaaccaaggtagcaattcataattagaaaataatcagtaaatcattactaaaattataagccatgaaatagttagcaacaaaaataagcacaaaatcatgaccttcaacagatacggagtttaaaagtgaggttctctcacaaacagatacaaaccaaaagctacaggatatcaataccattttcttcttagttgtagatatttatgaagtatctcctatattcagtttgtgagaatataaaaacttatttaccaaatagattacactgtgctatttattttgcacacaaatcttagcgactaagtagtattggctgaaaaaactagaatggatttgaaattctatctcatattgagaattttaaaaaattcttaagaaaaaaatgtacctgttttggaaaagtccactgagttctacttactcaattggaaagagtaaataaaattcaacagataatttggtgtttaggtagtcttataaagaaattcctgtcacaatgagaggtcatttttctatcttatttagttgaatcagtagaacctatatttatcttagcttcatctttagtgtttttttttaagtcataattatgaaacaagccttgaaatggaagtgcaagaagtaaattcaagtgtcaggtttactactgtgtctttgagtaagtcactaagaattttagagtcttcagtctcttaatctgcaaatgaacataaaaatatttgccatgtttatcccatgtaattaatgtaagactcaaataggcaatattacatatggaaaagacactgaaaactattattatctgagacagagcagcacaggaacagatcacaggtttagaatgggattcaagtccaatgccaccatcaccaacagtgtacctttagataagtcatcaaatcccttccagcctcaatttcttcctccactaaatgaggcagctaatttgtaaggttctttccatctttataagtctgtgatctggtacgagaaacctaatgaagaaattctctaacatgcttttgtttcctatgaaagtaacgtacactgattaggtgctcatgattaattttagactctgtcttgcaaataagagaaagtcatcatttatttggcaggaacaggctcacatcccttatgaaatgaggtgtggtattaatttattaactgtataccagaatgttcaacgttaaatgtaggaaggtggcgtttgtgaagaattacaagaatcattacatggtataaaatctgagcataaaactaacattggaaaagaatctgcccttgaaatacagaaaacaagtctgtactacattacttacagtctatgttaaaatcacacaccccatacaaacaaaagattacaactaaacactgaggaacagctgcccttgtctggcagtttgatatcctttcaattacttgtttttctgtagtgctaaacttggattttgtgtacaccacaactaaacatagaacagacaaaggctaagccacataagcttgttgctgtaagtgctacaagagcagggattcttgtctgttttattcactgatgtatcccaaacacctagaacacggcctgctgcatcataagcactgaataaatatgtattgaacagatgaactggcttccatttattccttgaatagataagctacattctgtttatgacttttattgatttgcatttatatcattaacatgcttctatagaaaaagagataaaccacaagatttaaccaatggttgcctgaataaaagagatagtttgggatgaaaataaatgaccagcacaaaagcttgaaacctgcctgttgccttaaaatgatctgaattcctcaaacctcaaaccttggcattatgcattatacccaggtaacttcacctgcacatgtatcccctgaatctaaaataaaagttgaaaaaaaagtagtttcttccagtgtaaaactacagaataaataggacaaaccccaaagctaaagaactgctcttttaatgttactaaagagagcacttcaaacgatggaggaagaaatctacatataattcacaaaatgggattaaaaatacatgaaaaaagagctattaataaatatgtctcttgtgtttcttcccgttaaaactcaaaacagtgtggtctgccttgtgcccacatcaaagaaagccagtgaactaagaataagagaaatgaaggctcaactcagtatctctctcgtggcgcctaaacacattttacaaaaatgttctttgaaccagcaacaaacccagaaaactagaaacagaacaggaagataaacccacaagagaaaacaaccatgacatcgccacacccccttctagttttctccaaaacatttttcataccagatgaacacagtaagtcaaacagctctatttttaaatgcatgagtcttggttgtggcataatagatcaatgagaaatcttttgtcttcaggaaaacacaagcctataacagaaagcatgtaagtttataaaatagcatgtctgataaagaaagcatcaaaatgaaagaatgaatgaaccagtgtgcaaatgaaatctctaagagagaattctagagtaattcaggaagaagtagcaatgtataaatgggctcatcaattctcaatcttcttctcatatgacataacatctcaacctgcctatataagaacttaggataaaaaggaagaaggaaaattaaaaggtgttgagactagcttgaacaattcccattgtcaaggccagacaggtattctggaagagaatagaaaaatccagagacaaagggaggtaacaaaaagtaaagtgccagcacaggtaggctggagagaaagtctagggagagttttgaggaaacgtggggataggccatagagtcacttaccatgctgtgattcagaaagaggattttaaataaagttttgctccatatatcaatgaaactcccatgaaatttttaagaggctgtaggaaggatttaagttacttttgcaatatttctagatgttatttattcatttattccacaaatatatgatgggggcactttcttaggactgtgtttacactggcagcctctgtagagatcggccatatgatgggagcaagaaagtccagctttatgtagattcctgaaagaaaatatccagaagaggaagactacagttgagccttgaataacatgggtttgaattgcgtgagtccacttatacacagatagttttcaataacagttacaagtatgcctgcctctcctgcctgccctttcctccgtctctaccacctccgacacccacgagaccgaaagaccaacccttctccttcctcttcctcctcggccatctcaacatgaagatgatgaggatgaagacctttacttaatgaatagtaaatatattttctcttcttgatgatttccttaataataacttcccatctctagctaactttattgtaagaatacagtatataatacataaaacacacaaaagatgtgttaacccactatttatgttatgggtaagacttccagtcagtgataggctattagcagttaagttttgggggagtcagaagttatgcacagatttttaactatgtggagggttagcatctctaccctctgcattgttcaagaatcaactgtatattctaatactgcttcttgttctattatttgagaacatccttgtatagaaaatgtgttacagtcattatggaaaacagtatggaggttcctttaaaagttaaaaatagaactaaaatatgatccagaaagtctacttctgagtatatatccaaaggaaaaaaaatcagtatgtcaaagatatatttacactagtatgttcattgcagcattattcacaatagccaagatatagaatcaaccaaagggtccatccatagataaatggataatgaaaatgtagtatatatacacaatagagtactattaagccttaaaacaggacagcctatcatttgtgacaataatggatgaacctcaagaacattatgctaaataaataagccaggcacagaaagacaaatactgcatggtctcacttttacatgtggcatttagaaatactgaactcatagaaacagagagtagaatggtggttgccaagggctggggtaattggagatgttgcccaaaggttacaaaggttcagttagacaggatgagtaagttctgaagatctactttatagcattaataataatgtattaataataatatgttctatacttgaaaattactaagagagtaggtcttaaatattctcaccacaaaaaattctaagtgtgagaggtgatggttatgttaaccagcttgatttaatcgcttcacaatatacatacatcaaaacaccaccttgtacgccataattatatacaatgtgttttcagttgctgtcaaccaacagatgaactttcagaactcaaccattcaacttagcagctgcctgttcaccggacaactttttcccatagctagtcacgatgctttttcattctcttctaaaggttaaagtaaagcactaccagtcctcatgaatttctcatgagttatgattaagtgcgaccaaattccaagcactatttgactgagaaatgtcttcaatctaaatacacgggtatcaaaaccgccaacaataagaacccaaggctatttccatataaatttggtctttgcttaaaaataaaattccatgaaagttccctaagataatcacccacacagagtgttttccatgattaacaatggcatttgtgctatagtcgctgccaggaagggaagcatgagtctggcttcggccaggacagcaagagagatctcctctaaaaacagaatacagtataactcattcttccagatcttccagggaaaactgaatgacgagtgtgtgaatgtctttttaaaacaatctgttaaatgcttttagatcctgtgccctgattactggctgacctatatatttttggcaatgctagtgccctagagggcctgacaatttgataggcagttaagtcctcagttaagatgaattttgaaaaagctgagattaaacagactaatttcccgcaaaagtattttcttctgatctttgaaatgttaaaggggccacatcagtgtattattttgagcaaggaaagttttgccttacaaagactgccagtataaacaactaatccctggccagttgcacaagccagacaaggcacagtttccaggcagaagcagcggctctctacctaatggggctgggtgagagggcacactcacatagcacattagatttcctgtgtaaattatcatttgtttctaccgtatatggctattacaaagcatgttgtgaagatccaataagacaatgtacagaaaatgtctagtgtagcatctgacattatcattaccattacaatagaaacacattctacccactgtttggatcaggtggaaaaatgcaaaagaaaaaaattcttttttttttctttttttgcagcctcatttttggaccagagtatctctaagtatctcaaaagtattgtaatgtcatattatatttttgaaatgttttattttcttataatcaaatatttaaaccaatattttgttagcaacaagctaatgaatagaaaatggaaggtaacttcttaaatattcatgatttctaaaagacagcttgcccactgggattctttggcagatatgcaattaccattgtagagaactaaaaggagctttaggtatcatttttaaaacaaggaaactaaaacccaaagagactaagggaatgccagacctagtacaaaaaaaaaggatctactttggacgcctgtaaaaatgtctttgcactaatcttagctattaatacatccaaatgaggctcagtcaccctcgagtcaccctcagatggcatgatcatacaaataaggggaaattaacatttgcaaggtaaatactggccaaccgtttctacataaattactgtctttagttctctcacaaaaactttgcaacatagatattatcagtgttacttttttgttttttttttggagacagggttttgctctgtcactcaggctggaggacagtggcctgatcatagcttcatatctcactgcagcctcaaactcctggcctcgagccatcctcccacctcagcctcccaagtagctgggattacaggagtcagccacagagcccagataacagtacttttttttttcttttttttagacggagtctctctgtcacccaggctggagggcagtggcgtgatctcagctcactgcaacctcggtttcccaggtacaaggaattctctgcctcagcctcctgagaacctgagattacaggcgcccaccaccacgtccggctaattttttttttttttaatagaaccagggtttcaccatcttggccaggctagtcttgaactcctgacctcttgatccacccacctcggccccccaaagtgctgggattacaggtgtgagccaccgcacccagtcaacaccaattttaaggtaaggacagtgaggccaataaagaccacaagatcagtagtaggcaaagctgggactcagatccaggtctaacccactacaaagcctcagccattttcaatatacttcagcatctgctagaaggttaagtgagtcctgcaacacccccattattgaaaaaaagtcactttttctaattttctggctgttaagtagttaagcagaaactttatagccaaaggatgaaaactgttccaagatcacatacctgtggtggagtcaatggtaaaaagggacgacacgtttcctggaataagctcataagccactgtcccatatatcccagagtcctggtcagtggcaagaacattgatgatctcggtgcctggctgggtctcatcactgatgctcgtcacataggttgatgggttaaacacaggatgattatcattcacgtcctccaggtccacacgaacaaaggcttgggcacttagcccaccctggtggatgaatgagtggtgattacaaatgggtttttgctgaacactaggatgtagaataattgacaatggccctacaatagtcttgaaacaacagaatttgaatatgtgggggtttgtatatgtatatgtgtgtatacacatatacacacacccccatacatacacattttgtcatttcaaaagagtgtgtatatatacacacacacacagacacacacacacacaaacacgtctttatattcattttattttcaactttgatgtatgaattcataggtaacagcatggtatgtacacttcactgctgattcttaagcatggaatgagatttccacttagagcagctgtgaggcaaaaatttcagagtagaggccaaatacattcaaggaaatttgtcctgatgtccaaaaagaaatcaaaatcacttttatccctaagataatttttaagtgaatgctggtaagtgctaagaagaaggtgtgagggagcatgggcaggggggtgccctggtgaagccttcactaggaaggtaccattggtgtgcagaccaacccacatgaggcagctagacttcagttaccagaaaggaaagaataacaggcagaggaaagagcagagccaaaggccctaaggcaggaacgtggtgtacctctcaggcctgctcagccgcagcaaggaagcaggaagggctgagctcagagaggcaggagtgagtcctagggacctctgcaggtctctggaaggacatggttcttcctcacaggagggctttgagcacaagagtggcctgatttcactgagatgttaacactgctctagctgcagtgttcagaacagaccgaagagcagcagggtggaaggagggagaacgggcaggaggaggctctttgaatcaagtccagagtggatggggcctgaaggaggacaggagcagtgcaggtactcatcccagatcctgggggccagatttgtttgggaattctgaatttttcaagttttagaagggaatgcagcacctaaagtagtgagaagtggatcccatactgcttttttggtgttgcctccatctaaaatcaaggagaaagagagcaaatgaaatagaagaaaataatcctctgcaatttttacttttctaaagtaaaacacatgttcccactttaaagcaccattttctgtttctatctggtacattttgacactttcatctttgacaaaaatccttggtaagtcacaacagcctgggttttctcactcatgtatcctccccctcttcatcttttttgtttcctttttctactctggcagggaggcacagagcaaggaggaaaaatgacaaggaggaagaagatttggcaagggacagagggagaactgctgccatgcagagaggaagcacttgttgacagggagagagggagggcaagaatgaagattgtatgggaggaaggtaagacaaacccagaaacggctgtcctgctctgagctctgagctctgaggtcccttgtactccaggctttgaggactaaaaaatgatggggaaataatttagaaatagtctgattttccatgttctgagttgaataaagtgccagagccatgccgggtatcaattagaataggagaaatggggctggttatgattccacaaagaacaatgcaagttcatctatctggcctttatgcttaaaatgcagggtcgccctacatctgcagccaccctaagtaacctgtatgtctccaggttcgacgtagtaagaggggactgcacactggtgataagcttatagaaaatattccttcacctctgccacagaccctgctgctgctcgaaactgcctttcttctcagttttgctttcccttttcctttccccttcctctttcttttttatttctcctcaaattcaagaggtcacttagggttgaggtaagagaagtaatgaaaaagtggggaaaatatgaagaaatgaatattgccccagcttaagatatttaagaacaaagatcctaaatcaggcagtgctgtaaaaaataagcaaatgttagatgcacaaagtggaaaacgtataatacttttttttttttttttgagatggagtttctctgttgttgcccaggctgaagtgcaatggcacgatcttggctcaccgcaacctgcgcctcccgggttcaagtgattctcctacctcagcctcccgaatagctgggattacaggcacacaccaccacacccggctaattttgtatttttggtagagatggtcgactggtctcgaactcctgacctcaggtgatccacccaccttggcctcccaaagttctgggattacaggcatgagccaccatgcctggccaacaatacatttttgttgccggtagggtaagcacactagtggggctagagagggctgggcatttagtgacagaggctgggcagaatccagaggacaggcttggcagtcagattcctctcacctgatttaagtgctaaagaggacagatttattctactccatcagtataaaatgtggtgtgtacattcttaatatatattttttatctgttaataaactgtatatacatttactgtgctaatgtattacttatattacaaatatcagaaaactaaaatgtaaaaggacagaattctaatgttgtcttcttaaacacccacatgggacaactattgctatcctcaatgaaatgacaagatcaaatctagattttagaaagaggtatctgggatagggaagaagagatgcatctttacaaaaaaggtagagaacttcctcagacaaaaaggggggaaaatgctgaattcaccaagttaagtggatgcattctatgcctcagaacttctcacagagccttttgcacatacatttctagagggagtgagttctgaggtgttccccactctttttaggccccagaatgctctttgaaagaaacatattgggaaaccagtttcccacagaacacagtgcgggaatagctgatctaaactaattttctccatccacttagagtgtgcacttcccaatgctgtgtagctaaacttttgtccagctcatggaaactgtttcgataatgcaacctcatgagagactgagtcagagccacccagcaaagccacttgcaggttcctggcccttaaaaactatataagataatgaatgtttgctattttaagctgctagattcaggaataatttgttatacagcaataggtagctaatacatcccataaattccatgcatgagtatgtcttaattttgtcttatcatttctttttccactgatgattcatgtggcatttttatttcattttcagcatttaattgtgaggattatggtaggaaacccaatttcttcaagttatactataaaagatgaaagttgtttgggaaagctccaagcttgaaaacatataatattggaggcaggagggtcgcctagggcaatcagcaggtagggaacattttctaccgttacttctactttggtaattgtctgctttccattctctttgttcttgccttctgggactcctgaatagtagaatattaataacatctctccttcacatctctcagctcttgtgagctgtggtttcattccagtgagctttctatgtcaatgaactccagtctatatttcatgattcaataaacaaaggtggaaggaaatgaggttccagcttcttaaaggggaaaaaaaagaaacataagttgtgacatcaccaaatccaagagaagcagcatctaaagaatattttcaaattcattgagaggatgaatcagataaaaataaataaagaatcccaggttatggcacgacagtaaccatgtagagaaaagcagtcttatagaagaggtagagagggaaaaatagatcaaataaagattgaaaagtgaggaaatggagaccactattttaggagacttgctgtgaagaaagaagaagaataaaatggttttctgaaaaggtacatgacatcaaaaggaatccagagtattttttaagatagagactattattatgccctgtatgcttatgagggtcatccaaaagagcttgataaattaatgatgcaggaaaaaagagaaaatcattatagaaatgttatctgtaagaaggctggaatggatgggaccctaaacagtagagagatttgcttttgatgcaagcagggacatctctaaaaagataatagaaaagaaagcaaagaatgtgagctgatacgcaggtaggttagtggatttggtggtaggaaggtaagacctttctctctcaagcagacctgttatttttctccaagtacttcagctgctgagatggcagtgcagaaaatgcagcgtcagatttacgtagggctggggttttaccaggagagttctattgaatgggaaaactaaagggagtttgcaactgagtgactttagtgatgggtaacaaatcaatgatcttaacatgggagaagaattattgattaaagtggacgtgctacagtaaattagacagaaagataaaaatgtttatcaggaacagcatgcttgaagccaagatatcaaagctgtgcaattactggtgacaatccttggaaatgagaaagtcaaggaactgagaggctcagggtgctgggttgttcagcaaatgatagtaaagtctcccagaatgatgaggaaactggtgaagaggaagactgtgaacaaagtgtgaaagtcctaagtgataaggaggtttaagtcatgacaggaaaaaaaaaaaagaggagaagtatctatggtatagtcagacaacaagaacttcaaaagggattcgtttttgatggagaaaggagtagaaattatttggatgctgccctgggcaacaagcagggcacccaactcacttcctgtcagcttgtgattggtggactatgggcttccttgtgagagtgcagaaaggaacgggtatccttgtggggtaggttgttttaatcagggccgaaagttaaagaaacaatcagagaccagcttaagttcataaaggagtttgctaaataatggaccacgagttccaaagggcatggtagaagcatttcgaagggcagagaaggcaggtaggtgtattagtccattctcacattgctataaaaaaagaaacctgagactgattaatttataagaaaagaggtttaattggctcatggctctgcaggtgaacaggaagcatagcagcttcagcttctgggaaggcctcaggaagcttccaatcatggcagaaggcaaagggggagcaagacatcttaagtggtaggagcaggagcaagagagaaggcggaggcagaggggtgttgctacacacttttaaataaccagatctcatgagaactcactcactatcaggagaacagtaccggagggggatggtgctaaactattcatgagaaatccaccctcatgatccaaacacctgccacaaggccctacctccaacgctggggattacaattcgacatgagatttgatgggacacagatccaaaccacatcagtaagagattgatttaaactaagggatgaactgggcagggtggggaggagaatatggataataataaatggcttggatgcttaaacttttagagattagaaggaggtaaaggagtattgaagataatttgggatacatcctggtcatatattaaagaatgatgggaaatctaagatatggtccaggcaatttagttagaaaacacgggacaatggggggatggggcaactgctcattcctagaacaggtggagggtgctaatgaaggaaacgaaagacaggaataagcatttgaacatttgttagaaagttaaagaacataatctattaaaatgaaaatgaatgtgcctttttactcagcaagtttactttttgggagtaactgcattgcacacaaactatgagcacaacttcagtagccaacttttctcatgaatgtaaagaacagtgaagagctcagtccgtttacttcctttcttgctcgtctgacaaaatcctcccttaaaccttcagtggtgagatggagttgaaatagctttatctcaaacacatatgtcagctacagaatccaggatgtaacaaaaaatagagatagagtgttaataagcacatacaccaaaaaaaatctatttggtaaaaatgaatgggaaaaggaaacaaaaaattagatataagcatggaataattaaattgtagagctttcttgtgaaaaaccacttgattgccaatgtaattcaattgtttggttacattatgtaattttatagcattctcatgacttatgagataaatagcagcagcagtagcagcagcagcaaaaatagagtatttcagaagtaatatcagtagagtagaagtgactcagttgaaaaaatattgacagtcttcacaaggataaatagagcagtagcaacgaacatcaatgtattttacaagaaaaattcttctactggcagataaaaatctcttagtaaccaccagcaaatgggttctcagcaattttcttctaaagggctttcaggacatttattacaaagagaaggaatcagaggaaaaaccagagattgtcaaggtaacaacataaagttaaaggacttctgtcaaggttcagtttattggtttaaataaactcattatggcctagaatccaacaacgtaaacctaaaatgtcctgtctgcattaatttattctttgaatgcagtctacgttgctttcaggggaagactactgagtcattaccaactttgtcatctttctctttaccaacctttttgactatgcatttctgagggacatgtactgctaaataatattgcaaagaataattatgatagatgcagaagtcaccctgtaaaaactcagttcatcacagaagaaattcatgaggattatgcagtcaacagaataaatgctgcacactggataaccttgtatttgtatatatgtttacatacatatatacatactatatgtgtatacatacacatacactcacatgaaaacacatatgttgcttgctctccatatattctgaggcaaacataaggaatgctggaggcagttttaggtccagagtgaaggttggggatttgttaaaagcctgtgatgtggaggctcttctagaatttgtcttttaaaatgcatccctgggcttgtgccaggtcccgttttcacataaacctacttcaggaggggtcctgcttccaggaggggccctgcttccaagagggttccctcctgcacacagctccctgtctggatctccattcagcctcatacctgcaagacgggcaagagggcaagaaggagaaaatcacagccaagatggagaaggtgtgcaagcactcaggggagaaggaaaactcgaagctctgacaacccatttccaggcaccagatgttaaaagactcagattatagaaacatcatgttccttaccttcaccagggctaaatgtgtcattctctgctcatcctgaaaacaatgaattgatcctttttggaggtggatattttaatagcaaaaaaaaaaaaaaaaaaaaaaacttgcttatataaccacctctatatctacaataccagaaaagacacctggattaaagtcaaaattcccaatgcacttctggagcactgtgctttccaggctgtggtggtgcattgatatgacagacaggttatgagcatttgcaggggagcttgcttctcctgatggacagcagttctacgactacaaggatctctgtgtcctgcatctggccaccaaaacctggaaactagttgaatcaacaggggcttgtttagatcacagtggacagcagacagtagcctggaagacacagctaattctttttggtggttttcatgagagttgtgttttaaacccattattcaattctaggatggcattatacaattgtctcaaaatctatcaagaatatatttttaaggcttggattaatatttgggtgtgcatctattgggcttcaaataattacatatacttgaattaatataaattctgtttactcctattttttgtttcctacatattttcttacatagagtcagggattcctgaaactacatagtaaggtattggcaaaaatctaaccaaacagatcatgaatatttattgaatataaagggctgtacttcatgttcatttttacatgtttacttgtaatatatttagactcattttttccccaaaattcacagcttaaataggtggattctctcactaatttcaaaagagaatgattagaccagagaggtgttagtagggtctgtctatacaaaagagtagtaagcagatgaaaaagaaacaaggaaggtcttcaaaatgtataagtgaaaaatataagtaaagtctccaaaatgaaataagtgaaaaaaaatcaaagcgcagaacggtgtgtatagtaggccaccttttctgtaaacaatgtaaattgaacacgttgtttctaaactgtatttggaaatgtaaatggtcaagaatagtcaaggtaatcttaagttagaacaaagctaaaagaatgtatgataccatgacctatgataaagctaaaatagttaagagagatgttgctagcactaaggtggataaataggtaaaagtgagaataaccatttcagtaagtggtgctgagttaatcataggggaaaaaataacaaaacttcttcccactagattgaaaaaaagtaagtatgaaaggtaaaacaaaacaaaagttttggaagaaaacaataagagaacatcttcatatccctaagataagcaaatatttcttaaaagaacacaaaaatcactagctataaaaggaagcaaactgagaaactactaagctctattataatgaagaacttctgttcctcaaaagaaaccattaagaatagaaaaggccagccacggaatgggagaaaaatatatgcagtaaatatatcgaaaaaaggactttcaggccaaaaatataaagaactcatgcacatcagtaagaaaaagatccaacaataacaatggaaaatgaataaaggattttcttctgtgaagaatagacacttcacaaattatacgaatagcaataaacatgaaaaaaaacctcattagttattaaacaaatacaaagtaaaaccccagtgtgatatatcattacataagtactattatttctataataaaaaaggcattaaatatcaaacattagggagaatgtgtagcaaatgaaattttcatacttcactggtgggagcgcaattctactcctttgtatatactcaagagaaatgcttacatttgttcaccatattgcaagtataagaatgttaaaagaagcatagcctaaaatggataccaccaactatagaacaggttaaaattattgtatattcacataaaggcatactataagccaatgagaatgagtgaactattgctatacacaacagcataaatgattccggcaaataattttcagcaaaagaaactcgacagaaacacatactgtatgattccattcactgaaagttaaaaaaattggtatactaatgcttggtgttagaagtcaacagtggtttctaaaaaggcagggatgggggcatggaggggtggatggaggacagttacaacaagatgcaaagagggggcttctgggttccggtaacgttttctcatttgcttttatgggtctgttgattttgcagaaatccattgagctatacacttattatttgtgcatttctctgtatgcattttatatgtcaattaaaaagtttaacaacaaaaaaagacaaaggaatcaaactgaaggtgccttcactgatcaagaatgggccaatgagaacatcagaaaggatagggtcagcaatgtattgaaatacatcaaattttttaaaatccaggaatttatactcaaattaggaaaaagacattattgtttacctttggagataattaagacagcaagttactattaaaaaaaactggtaaaataaaaacaaataatcaagccttatcctgcaattcctgtatgaattatacttaagagtaatcaaatagttgttgtgagaacattttccttagttgaagaattccagataataaatgcaaaaggaataatagaattcaaaagctaccatttttcaacctctaagaaaataatggtatgtgtctgctgatgcaataagaagcaaatggcatcacctaaatgaatctgaaaacaatcagctctctgtctctaatgctagtttataggaaatagagggaatggaagaacacagtaaatgaatcccaaggatgtaatcagccacatttagcatgtggaaaatctaccggacaaatgacttggttttttaaaaaagccataggagaacaggtaagaggcctgactgttacagatggaaacttaaagaatatatcgatcaaatcaattgtgaacttatttggatcttcattcaaagaaaccaactataaaagacatgttttgataatcaagaaaatttaacatagaaaggatataagatatcattaaagcattattgttaatgttttgtagttctgtgtttttaaagtcatttttagagatattcttgaattatttatgggtgaaataacatgctggatatttgcttcaaaaaacttcagcaaaggaaagaggtagtgacacatgaaacagaatgacccaattgttgatcatcattggtcctctgtgatgtatacacagtggctcacttgtgattatgtttaaaataaacttcatacataaaaacttaccccatccttagcttccaccaggagatcataggtagctggatccctttccctgtcgatatcttgagaaacacagatttgcccatcatgagggtcgatccggaatgcctgaggtgcttcatagctcaggaatccatcataaagagaatattcaataaagccatagagtcctgaatctgcatcagaggctgtcacctgtgagacaggagggtgatcaggaggaaacagaaatgctagcattacttttcagtcagtcatgaattattaaaacaatttgcacaaccacataacccccatagctattcacaaagcctaggctttggtttcatatctctctcctcgcttaccttctgtgataattcccccttcacttttctcctttctttgtgagttctccttttcaatatctcttgcccactcctatcttttcagatgatctctgaaagtttgaggtccctaaggaccttatttcattcacttatagtcttcttatttcattcactatacgtaactaatctcatccaatctcaaagatttaagaatacccataggattaaggacttgacagccaagctgttgattccctctcatacctaggccttcaagtgataggcttgatgccccccacctttgagagcagcaaggggagggccaagaaatcaagacagtaaatgccaccattactagaaacccaatcccagtgacagaattcacactggaatgtgagagttgagtctccctggccagctttccttctgggagtaatgtctcaatcagggccctgcacagtggtgtagcattcagtctgcaggtgcctgtaggtacatggggaatgaaatccagcccatgctgtgctcgccaaaacaggcacaaacactgacatgcccagaggaaaaggcaccgtcttattttgccatacgtaccacttatgttaccagcaatcctgtgcctgatagaaaagatgaagcaagtgaaattatgaaagcacttaacttatttatactaactgtgggagtatatagtgagaaatacaacaggctctatagaactcaaaaaattctcaagctcataggctcatgatagataatgcttttaatttacaacccaactaacagtaagagcaaacacctacatagcacttacaataaaagcagcactttaagggaagacagaaagaaagagaggaaaagaggaggagggaaggaaggaagggaggaaggaaggaaagaaggaaggagggagggagggtgggaaggaaggaaggaaggaaagaaggaaggaaggaaggaaggaaggaaggaaggaaggaaggaaggtaggaaggattccgtgctacagaacacgtactcttataagagcttaaagtacatcacatacttacaacctataggtactaacgttcactcttcagatcagacaagtcaggctcagagagtttatgtaacgggccaaaggtcacataacgaataagtgtcaaaactgaaattcttatccatacaattggcagcagagggcatgctctaatgaccatgatctatgtgctgcctcccaagtctgacaccttgtcatataatcctttatttacagaaaaatcagaccccaaatctcctgaccttcctctgatgcagaatgtgctagattatgtgtagcaccattccaagtaaatgtttaccccaggtatatgttgtttctcaccataatatcattaacatgaagaaaggcaactagtagtggtgcctgtgctcttaagtcttagctgaaccttctattccatgtgatcaaattccaaatgggttccagaatgcagaaatataaagtgatgacaattggaaataaaagagaattaagcagattaattcagaaagtccaacttcccactaatggacatcacagaaaaagagaagagaaaacagataaaatggaaaaaaaaggagcaaaggagcagctatttctttggttcacaaggacacatacatgcaaggtccccaaagtcactctgacagggaaggagagagatggaagaggcattctggcttttaacttctttggcccagaagccgtgctcagctcacattccactgggcagaaccagttatatgtccccagcttagctgcaagggaggctgagaaaaggagaggagcatgaggatatttggtgcatacaaatagtctttgtcatacatatcatttagtctagaatatgtgaagacaggcacataagattatgtaggtctccaagtagatgtagtgaaacttaagcacgaggaaagttatacccagaaatggctacccagtgccactctactatagatttagttttggaaagtaattctggctgtcttgcatatatttgtaagccttttaggagggaggcaaaaataaaagacaatttcatcacctacaatatttgtgctcttattatactcatttaactctggactgaaaacaaaataataagcttttcatcaatataatatacatgcaggagctacaacttaattacagtacttcccaaataaagcttcatcctgacaacatgttcaacaaagttctcaataaaccttctccttcatcctgttccatcttgagcatataaccagaatgtgacttttggagctattttgaagtagtctagcttagtggttctcaactagggacaagtttgccccccaagaagacatttagtatgtctagagacacttttggttgtcacaactggggaagggtttctactttcatttaatgggttaatttaatgggttaattcgagagatactgctgcaatgtattatataacatcctacaatgcataagatagacttcacaacaaagaattatctgacccgaaatgttagtagtgcctagactgagaacccctgggcatgatgaaactcctaccaattggcagtgttattttcctgctttaattgtctatttcttaaactgatgatacagcctttaaatttatcttttctctcatctatctcatattctgtagcaaaattattcatcctgtgcaaccatctaacatatttataagttcttctcatcacttcttctcatattgtgattcttctcatcagttgggctgaagcaggaaatccacaaatttccccactacaaagaactaaactccaaatacatttggtctattctattctgacagctgttaataatttagaagcttcaagttcctgaagacaccaaatatatcttctaaagccatatggtattctcaataactttggcttcattgaaagacacatacaatgaacttttaaattttaaaattcattcttagcctttaatagtacatattaataagtgattcagcttatataaaacaaatttccttacttccactttcaagacctttttctcatctggacttttggcaaagcaaaatgtaaggagacaaaagtaggataaaagtattgatctcaatttatgttagcaattcatattctgagtttcagaatcgtaacataagaatgtttttcttcctgttgtgaccaaaatacctaaaaatattgacctagtattctcaacaacatatcccacctattgggtcttgaatgcctagaattaatattgggtcttgaatgcctagaattaatttgacatctttctaagatttatattttccaatatccattgactgacacataaaatttaggcaaattgagtaatagaaaatggaaatggctttgtcaaagcttcaagaggaaatcttgcttagttaataagctccatgggccctttctccaaagatgattgtttaaattgaagcaagaggcacctggccaactccattatcgcaatcttatggtgctgattgagcatcagaggatatctcaagaggattttatccctacgtctacttattgagccacattacagcactctaaataacattcctgtgttcttcatcctaatctcaatttacctattttagacagagatgaatctgatacttttcactgtaaacttcttccaactcagaattgttctccccaagtctatctttcacaagtttgatggaaacattataaaaatgcaaaatatcaatatattattaaaatccccctgattccattgttagctttctgagatttaaataatttttatcagacaaggatatacactttcgccactcctattcaacacagtacgggaagtcctagccagagcaatcgggcaacagaaagaaataaaaagcatccaaataggaaaagaagccaaactatctctctttactgacaatataattctatagctagagaattcgtaagactctgccaaaaggctcctggaactgataaacaacttcagtaaagtttcaagatatgaaatcaatatacaaaaatcagtagcattcctatacagcaataatgttcaagctgagagccaaatcaagaacacaatcccatttacaatagccaccaaaaaataaaatacctaggaataaatctaaccaaggaggtaaaagatctctacaaggagaactacaaaacactgctgaaagaaatcacagacgacacaaacaaatggaaaaacattccatgctcattgattagaagaatcaatattgttaaaatggccagactgtctaaagcaatctatagattcaatgccattcctatcaaactaccaatgtaattttacacagaattataaaaaaccattctaaaattcatacggaactgaaaaaatgcccaaatagtcaaagtaatcctaagcaaaaagaacaaagttggaggcatcacattatccaacttcaaattatactatagggctacagtaaccaaaacagcatggtactggtacgaaaacagaaacatagaccaatggaacagaagagagaacccagaaataaaacatcacacctacagccatctgatctttgacaaagttgaataagcaataaggaaaggactccttaatcaataaatggtgctggggtagctggctagccatatacagaggattgaaactggttgcccacctttcaccatatacaaaaattaaatgaattttaatttcaactagatgaattttaattttaatacacaataattcacaatatacaaatatttaaatggattaaatatttaaatataagacctcaaactataagaatcctagaagaaaacctaggaaacaacattctggacattggccttggaaaaaaatttattactaagtcctcaaaagcaattgcaaccaaaacaaaaattgacaagtggaatcgaattaaactaaagagcttctgcacagtataagaaaatcccaacagagtaaacagacaacccctcagaatgggaaaaaataatcacaaactatatatctgacaaaggtctaatatccagagtctataaggaacttaaataattcaaccagcgaaaaacaaataaccccattaaaaagtgggcaaaagacattaacagacacttctcaaaagacgacatacaagcagccaagaaacatatgaaaaaaatgctcaatatcactaatcatcagagaaatgcaaatcaataccacaatgagatgtcatcttgcaccagtcagaatagctattattgaaaagtcaaaaaataacagatgctgatgaggctatgaagaaaagtggacacttaaatacactcttggtgagaatgcaaattagttcagccactgtggaaagaaggatggagatttattaaagaactaccattcgaacaataatccaattactgagtaaatatccaaaggaaaataaattattctaccaaaaagacacatgcacttgcatattcatcacagtgctattcacaatagcaaaaacatagaatcaacctagggacccatcaatggtggattagacaaagaaaatgtggaacatatgcactatggaatgctacacagccataaacaagaaaaatatcatgtcctttgcagaaacatgaatgcagctggctgccattatcttaagggaattaacacaggaacagaaaaccaaatactgcagttctcactcataagtgggagttatgggtataaagatggggacaataaacacaggaaactactagaagggggaggttggaagagggttgaaagtctacccattggttgcaatgctcattgcctgggcgatgggatcaattgtaccccaaacctcagcatcacacaatacactcacatgacaaatctgcacatgtaccccttgaatctaaaataaaggttgaaattacaaaaaataaagtaaaatacaaataaataatttttattacttccttcatattaacatctaggtaagaattcctccctatgaatgtgtcatgaagacaggagacaaattgaaatcactggcccttgaaggcatgtttccatggtttttggatgttctacaagtggaatggatctgcttacatccccctcatcaggataatagggcttcctccccttcaacatcagtggtcagtccagccatttatatcagccagactccacccaaaaggcatgatgtaacagggttggccataattcctctgtctactcctaagcaattgtacactcaactcagcaaaatttgtgaaaaaaaataaaaacgtctcagagcccagtaaaaaagagcaataaaacaggagttctagtggaaaaaaaaatagcagcacttaagatgaaattcaaaatgaaatagcccactttaatttttttcttattacaatttccagtttttctatccatgagcatttaacaatttgtttgaagaaacaaagttattaacacaacacacacatagaactttacatagaaaagaagaaaaaaatcattaaataacgttttacatttgaagcactggacaaccactgatcctgcagctgaaataggactataatattccagtggaacttggaatcagcattggggcccacaactaatgcaagtatgccactctctgaacaccacttggcaagttcaccaagttccaaagtctaatgatcgaggcttgatctttattttctgaattatttggcagccgttcacacagctagtcattgcctccttattgaaacatccttcatcagacaccatgttatggccctcctcctcatgcaccacctgactgacctcacctcagtttccttcactggttttgcgttctcttcctggcttctgaacactatagcaccccagagctcagtctcgggactacctcttttcaatccacactgactgcttgtaggggactgaatgctggcctccaaaaaacctctgtcaatgttctaatccccagaacctatgactattctcttatttgataaagtagtgagtactaccttatatggcaacagacatgattaagttgaggattttgagaggagaatcttatccttgcttatctgggtgggtcctatatccaacaaatgtcctcacaagagatagacagaggaaggtctgcccaacagaagaggaggaggcaatgtgaccagggaagcagagattgaagggatgtggccacaagtcaaggaacaccgacagccaccagaagctggaggagataaagaatggattgaccccagagcccccagaaggagcacagccctgctggattgcagacttctagtctccagaactgtgtgaaagaataatttccgctgttttttttaatatggaaatgttttttatttttatttttatttttattatactttaagttttagggtacatgtgcacaatgtgcatgtttgttacatatgtatacatgtgccatgttggtgtgctgcacccattaactcatcatttaacattaggtatatcttctaatgctatcccttccccctccccccaccccacaacaggccccagtgtgtgatgttcccctcctgtgtccatgtgttctcattgttcaattcccacctatgagtgagaacatgcggcgtttggttttttgtccttgcaatagtttgctgagaatgatggtttccagcttcatccatgtccttacaaaggacatgaactcatccttttttatggctgcatagtattccattgtgtatatgtgccacattttcttaatccagtctatcattgttgaacatttgggttggttccaagtctttgctattgtgaatagtgcccccaataaacatacatgtacgtgtgtctttatagcagcatgtttataatcctttgggtatatacccagtaatgggatggctgagtcaaatggcttttctagttctagatccctgaggaatcgccacactgacttccacaatggttgaactccatctccaggctggagtgcagtagcacaatctcggctcactgcaacctccgcctcctgggttcaagcgattctcctgacttagcctcccaagtgctgagactacaggtgcaggccatcatgctcaattacttttttttttctgcatttttagtagagatgaggtttcaccacgttggccaggatagtctcgatctcttgacctcgtgacccacctacctcaggctcccaaagtgctaggattaaaggtgtgagccaccacgcccagcccaatttctgctgttttaagccaccaaattcttggtaatttgttactgcagccctaggaaattaacacactccctgagtggtctgaccagcccacgacactacaccaatctctgtgccaatgactccccaattctaaatctccatctgggctccagactctgcatcctcctatgccaactcacacctcacacgtcttaagtgactaattggcatctcaaatgcaacctgctcaaagggaactcctgattcccaccccactccaccccacagtctgctaccctcccggtctttttagtgaacgatactaccattcactttctgctacacacagtcagagagatactgtctaaaatgacaccaaatcctattactctcttgctaagaatctttcaacaacttcccatcctacccaacataatccaagtctttaatctgacccctggctacttctctgacctcatcctccactcctgtccgactctttcactcccctctggacacagtggtctcctcgacagtcctggaaaacactggcttgttcccaccttagggccttgtacttggtgttctctgtgcctgcaaggcctttcctccagcctttagtataacatgctcacatctctttactctttgtacacctaatcacacaggccttgattgatgctctagtcaagagtcactttacctctgtctcaccttttttttcttaaccctgctttgctttcttcagagaacttatctccaagttatgttgcattatatatttttatttatttgtatattgataataacatgtcttccccactggaatttaagcttcgggacaaccattacactgatctcgccccacccctaaccacccctgctgcatctccagcagccatagcactggtgcctagttcatattgaggtgctagaaatgtttgttgcatgaattaatgaatctaatactgtgtataggatacaagcacgtttaagaaataaactttatgactattctctctatttgcccttcagaggaaacacataagaacaagatggttcgtgacactcatcaaacactcattgagaaataatatttttactcataaaacactatctattaacgaagctatattatcatacaataagatccataatactttttcaaagccactaaatgctacaactaaaatcagctaggcaaaaagaaaagaaaactatctcaaagcatgtggaactattaagatgttggaatcagaacatcttttaaaaggtttaaccttttaaaatgtatgttaagagagactctcacagctattagatgaataggctgaatacatatcctcaagttacagcctgaaaaagttgttacaatagcatgtttttattgccttaattgaagaatgagtttaagcaaccacgaattctactacttaattattgtcctttcttcccacctcaaaaaagcagtctaaggaaattttgtgaaaggagaccagtggggtttaggggaatggaaagtaacttgtcctataaggtgttataaaataaacaattaaaatagtgtgatctaataaaagaattggcaggcagatcaatagaacacaaaagcaagacctgaaacagatcctactaaaactaaaagtgtatataacaaagaaaaccactgaagaatgtgggtttattcacataaattgctagaaaaattggcaaagtacatgaggaaaaatcaggattgatattaacctcagaccaaaagagattctacaccaatatgttaaatgtaaataatgaaatcatttaaagtacaaagaatatataaagaaatatttggctgatccttacattgaaaagaaatttcaaagcaaagaagtatttcaaaattaaagcagatcacaaaggaaaaagtcaataaattgactacataaaggcttaaactccattatgtcaaaaatatacacaaaatattaaaggcaaatgaggtatatctgcaacaaatatatagtaaaatgttaatgtccttaatgtagaaagaggacttcaaagataaaaataatacagatttcccagtaaaaacaaatagccaaaggacatgaacagacaattcatagaaaaatatatttaagatattcaacttcacttgtaattaaataaataaaaataaaataaaacttttgccttccaaattggcaatcattaaaataatatattaagttgtagaaagatgtattaagtatatgcttattcttacagcccatctgaaaagtaactctgtgtttaccacatatacatgttaaacattctcccaaatctaaaaatattcatctcctttgactctgttagcatatttctaagaatatacatagaaagatatttgtatgaaaaacatataatgtggcattatttattctaaaacccaaatgtccaatcagaaaagagttgttaaataaattaaaattcattcataagagagaattcaatgtaggcatgaaaattgtatatttaaagacacaataaaatgtccaaaatattgaggtgagtaaaaaaaaagaaaggtaactaaaaattacatataaaaatcccatttatgcaaaaaaattcagtgtatacaattaaaaactgaaaggaaataagcaaagggttaagtgatttaatgtggggaataggtgatttttttttattccattcatttctttcccaaattttcaaaaatagatgtaattttttttttttttttttgagatggagtctccctctgtcgcccaggctgcagtgcagtggtgcgatctcggctgactgcaacctctgccttctgggttcaagtgattctcctgcctcagcctcctgagtagctgggattacaggcgcacatcaccacggctgtctaattttttttatttttagtagagatggggtttcaccgtgttagccaggatggtctcgatctcctgacctcgtgatccacccgcctcggcctcccaaagtgctgggattacaggcgtaagccactgcgcccggccaaatacatgtaattttatggaaacattattatgaaaaagaagatgagcatcaaaaaatattaatcctaaaaaaaaattgtatttgataggcattggccgtctgtctattgaactattatgagtgcatcttcacagtactgggttcttgaagacccactacagcacggatggggaggagtcacagggctgaaggcattactgatgtctaaaccaggggtgagcaagggccggacagtaaatattttaggctgcacaagccataaagtctctgttacaactactcaactctgccattttagcatgaaagagccgtggacaataagtaaatgaatggctgtgttccagtagaattttatttacacatatcaatatttgaatttcatgtcactttcaattgtcatgaaatattatttctctctctcttttttcaaccatttaaaaatgtaaaaaccattcttaccttttgtactaggtggtacaaaaacagacaggaggctggatctgggccatgtgccatggtttgctaacccctgatctaaagcataagaagtaatctttagaaaaacagagtcaacacttcaggcccaggaataccacttcagaatgacctcagtccagtgcatatcaggggcttgtttgacatcctggatttgagctggtctcacagacaggtttactatccatgtattgctgtctctatgttctattcctaaagacaaaggttatatatatatatatatataacctttttttaaaggacctaaactatttgacttcaaaatgctttcactgagtgaaatttttatatcatgactttatattttacaaaaatttcattttaatcatttgtctttggaaaaactaaaacagaaaatggatttattacaggatccagtaattctttaatcgagatccttttaactttaaatctaatcacactccacgacccccacccctcctcgaaaaacacacacacaaatcaaacaaaacaaaaacctctccatggtacctatgctaaagttgaaggaagttaaagttagaggaatagagtgtctgcacaggagctctcattccagagctcctctctaccaaacaccctgtttcaataaggccttgtctgccctcacaggtaagatactcatctttaagagaataattaatttatatttatggcataaaaattaggttgctggtagctgatccacggactggcacttcaacatctttttagattacttgcttttgagttattaaattatttcagtgaactgacctaggctgttgatactctttttttttatttttttaaatttttttattttttttcttttattattatactttaagttttagggtacatgtgcacattgtgcaggttagttacatatgtatacatgtgccacgctggtgcgctgcacccactaactcgtcatctagcattaggtatatctcccaatgctatccctcccccctccccccaccccacaacagtccccagagtgtgatgttccccttcctgtgtccatgtgatctcattgttcaattcccacctatgagtgagaatatgcggtgtttggttttttgttcttgcgatagtttgatactcttaatcctgtggccaaagaatacatggaaatactggtagcaactgtaagtaactggctgactaatgctcaaaagttacctcacttttatatcactaagtcattcacacacacacacacacacccacacatgcacacacacacactagcccaaatacacctacatcatctttcatttccagatactcctgaaaaacaagttatgacgcctactttcccaagttcttactatatgacttcaaattctctttttaactgtttattattagcattaacagtgttagtaacaagtgaagttctcttagttctggttcatatgatcattgtcatgtacaactctaactattcaggacaacaatcattttcaaatacatttgtactattcttcatcaccaaacaataataaaataaagagaaagaaaccatatgtaaacaacaaagcaatccatgaccgaatattttcatagtattcttacaggtatctggaaacacacaaaaagtatatgattagaaaattttatttatccaaaaatgaatttggattacaaatactatatgtctatcatagatattgataacgtctaataccataaaactttaaatgacaaacaaattcatgagaggatcctagctaagtatttcttccaaggctttatttccctgaagctcagaagtaaattctttggccagtatgaatctcatatgtaatttagcagaaggaacagacttataaaagctgatacttatttttaatttttgttcttacctctgagatttcacaatggaatttattttcacatacacctcatatacacaggcatcagtactttcaaactgctgagtaaacatcttcttttctccgtcttcattctctgatttcgttatctcatccagtctcatgattttaaatatctcctatatgagggtagcttcaacttcatgtctctggcatgaaccctttccttgtgctacaggttcacatatggaaatacctccatgactttccacttgcagcataaagaaagcgttcaaaactaaaaataggcagatcagagagtcactgatgctgagtttgcaggaggaggcaaagtgctgaaggagaagaggaagagttaaaaagactgaggcaaaggagtgcttctctaggagagggaccatatgcaaatggcaacaaaagtccaggcaaaaagacaaggcgatgggcaactgggccagccaacctcatctgacatctcaacaccctctcgacaccttatgggttggattgtattgcaagaatccaaagtaaaaggtgactttcaatgttttgggggttctgtgtgttcccagcagaggaagaaaacaagatatttttctccctgcaatcacctgtactccatcaatgtgaacagcaggagatgaaggcgatgggccacgtgatggccctgacctgctgaaagctaaagctcaattccttttgaccaatattctaactcaagatagaagaccattgtgcagagttacataaatgttagtattcccagagaaaataaaaatctgaataacataccccaggttatgttattctatatactatatactatatactaacaggtgttctctcttggggtacaatcatgggaaaagttaacttataaaatgacaccgttttgtaaacaatgttttacactgagcctgatttactttatatacaccaaaagcttccacgtggtatgattgttaagggccagcctcttcccactccacccacaaagatacattgaaatgcccatgaagtccagagaggagagctggttgttgatttttttccaagcaattcacatttaagcatctccctcttttttgggaatgagtatcataattcagaatcatttgacttttatcttttagctgtaccttcccatatatgttttgtaaaacaaagagatacccagaatttatgcacagaggtcttcccagtggaaggatgcattcccagatataaacatgaacaggtgcactctaaactcaagggaaacccatcgttttaaaaaaatatataatgaaaaagacaaagagtagggaggcaaagtgagtaagttcacaatataaccttaagggctgtgatttccaatatggactgtgactgactgcactatagctaactgcttcagttttcacacctgcaaaagggtcatagtcacaatgggcaaatattaaggtttggaaacctattctcaatttagcagctttgcttcatggaggaaaagagaaaaccatgcacatagatctaactatggaagtgtgggatgcaccgttttgtataccagctcccaatataatcacttttacagaactgtatatttattgtaaacatactatttaggggacttcttattacattttagagtcccctttataaagacttacaggaaaaacatttcctcagggcttagtgtcagggaaagtcaatgctgcttctcttgatcagttaggaatgtttctaacttggggactgtttgagtcttatcacttcattgatgcagctttaatacatgtgcataatcttgcataatccacttccatgtactaaggcttcctgatttcatctcactattccacttgacttttttcctgatttgtttaattttatcttcatcttactgagttattgtagttttgttagtagctcatattatatttttaagtagatggataataaaatacattaacttaacaaatggtatccaacagaaatggatgttacaagcatacagctatatgattaatacctgattaaagaatttaaacctaggaaatgttttcagcccagaagagaccaacagataactctaaacatgccactaaaatgaattatgtgcaaagcccattccttgcaagttagaacttctacatgttgattcaagtcccattcacatggctcttcaactaatctctcagtgttccaagtcaatgattgggcttgaaagcttttggttgggggaaaaaaaatgggcttcatattttaacacatacggagttaagacaaagacagtatggagatataaagtgattcttttaaaaagatcctctttatgtaatagtttaatcagatgttgtatttcatggtgtgatagtcacaatgtcttcaacatcccaatgtcataagtgctgcctaaattctggctatgtccaaaaggtacttttaagccaaaaagcaggattttccagccaaggtaccctatagaatgtttcattatgtcatatgctagtctaatctctacagtcttccagaaatgtcccaccagtccactctttcgctgtttcagcctgacttggacatgctcttgtccatgatcctgaagtctaagatgtgccacatcaccactcccaacagcatgtccaaagactcccagaattaattacattatgtcctgatggtgtctgtctctacaaggatgaggactgactcttaaggtgactttattctcaggcaggtacaaaccatcaagtaataatatttatgtatataaatatttatgatgcacatatgggataattcctcagtctcagacacatccatacgcaagaattcaaggaatcaatctaagtaagatttatcatgcagttaaaaacacagttgacaaaaactaaaattttacacatccattggatagattctctctcaaatcagtaatcacaggtaaagaggaggtgtggagcggaaggctaggagaggacccatcacatttctcttctgctgcttcataactgttatcaatgagggagtcacagtccagggaggcctcagggtcaccaataatcttactctaggccagactaacaacaccgtacagcaaatttttattcttgaaatgcaatgcacttaaatcagcactattctgctcatacagaattgaaatgtcaaggtcagtgcaaagggattacagctggtcattaggcacaaggcccccctcaggagtcagacaggttttggactctggttttccctcttagcagctatgtgaccttggacagtaacttaacttctctgtgcttcaattttgtagaaaccgaataactcatctctaggcattctcttggttacaagtaacagaacatccaacaggaatatcttaaacaataaggacatttattatccctctttgtcaagatctgggcagtggtggggtgggcagttccaagactggttaattcagtagctcgataatcctatcagggttctaggtcctttatatctcactccttccattctctgaccatgcttgatgcattggcttatcctctttagcctggtcctcaaattgggccaagttgctgtttggtgctatacatcacttgccaatgacaatatccacagatagaaaggacaacatatttacctggcatccatattttagagcaagaaaactcttctcataaattctcaacagtgtttccctcaagtctcaaaactgcatggcctttccaggcctagccaattatttggcaagtcaaattagaccactatgatttgtttataccaattacaattcactccaagtggagggactgagaaagagccaaccagaatgtgcccatttggagaaaggtgaaaaacaacagggactctgtagcaaggacaaaaggcgtgagactgtaggacaggcaactactagatctgccactatcttctggaagctattttgtgttttaaatgagataatctgtgtaaagctcctaacacaatgcttagccactagtgcagagaagtaaaaatatgttagctgtttatatcattaagggcattattaataacatcattaagtatgagtaccacatagtctttccacaacattcataaaccgtttatttaaacactgaacacctgcttggtcacactccacctggagaatctgatgaacttttctgccaacctagcatgcagctacaggtgtgtgcctctgcagtgaccatgcacacacatttttctatactgtttcagctgaaggttcttggccctctgaatgccatctaggagactctggattaaatctttaaaaaatacttccttatacaggtcttcccactgatcctcctatctcctggattgctccgccatcacacttgtgatctgcctcctgccatagcccataagatctacaaggagagagaccatctctgtatccttcaatgctagttcccactgcccagtagggtttttgattcagcacattgaccaaattctatttgtaaaactgagaatttatcaactttaaataatgagttaaagcattttcaaagcacaagcaaattttctttccaatgcaaagtagctataagactattatataaaactcaagggtgggtttcttggaaagccctcaaatatccttagtggagaaaagcaggcaagaaggaaagtagacgaatgaataagaggacaaagaggaattatggtaataagagttgctaagtaagaagagggaagaaaacataaggtttattaactcaacttgtctctatgtgtgaacagtatgctaagatattcaatgtgctttcatttgacttaaaaaatggaagagttattcaagggaagagttcttattaccattttgtaggttaggaaattgagcgaggtaaacatttgtcatttctgtggttatacagcatcctgagtttaggagaagaaattgagcatgatcagctgaggcttttctgggatttttcttttcagatctggtctgccttaagaagatttgaactctttcttaaatgtaagtcttatgtcttccttgttcaatactttattctcagcagtagaagtgtacctggcacataataggtactcaatatatatagaagaaaagaagaaacaaaggaagggagggagggagggaaaaatgggagatggaaggaagggtgggggaagaaggaaggaattgaacaatttctgatgtctgccacatggtacaggttctgcccagaaaagagaggccttcagttgaccagtaattttgtctaatgcaagggtggagtatgaataagcccacttggccaccaattaaaagtccattctctaatcagctctaacagtactgatgatggcattataactccaatttgttgacacctaaaatctcttaactggctctgaattcaggaagggaaagagtttattgagctcccaatgccaacactttgtgctcaaagtttcaacggtgtctctaacctcctttatagcctattctcttttattttttgcaatgcctgttcctgccaaaatacacaatccactgtttcacacactcctcactccagtgtttgcctcatggtgttctctttgcatgaaattccatttcccactctacttcagtataacaaaatgctactcataattcatttatttgaatacaaaggcccaatgcaatttttaccactcccaaaactcttcccagatgcccgcagctgaggtaatcttcccttcctctgaattctcagcgctacttctctgtatcattctgatagtgaccatctcctatttgatttacttatatatcctaaaccttcctgatataacttcttcaaacagaatctgaaggaattggtaggaataatagcctaagacaagaaaggcatccttgttgaaatcagcctgagcaaaaagtaagacccatgaatgtctaactcatgttcatgtggagtgcaggaagcacaggggcatgtaatataagctaagagcagaaaaggacaccgcactaatctaattatactaattctaatgacaacagaaagccaacataagtcagcatgggaaagagacataaacagtaacatgggcaagcatttatcaggctaaacagattcttacatatttgtcaaaatctatttcattcacacataccatttgggctaagacttactgagtgattgttttctctatttcttttcttaacttcttttacaaattaggccaaaagtttgaagtaagtttagtctaggtctagaatacctattctgtatttgaaaagagagcccatttgtatacctgaaattgacccaatttaggatatgggctcaatttaagtaaaatattgcatcatattaaataaaaaagttcacttatacttctcatgcttcttaccaaatactacttgctttttcacaaaactgtgacaccctttaattacaagataccgtgtccctggtttttctagacaacaatccctccttagtgggtaccttttccctacttttttaacctgactgtgcctaacagtctgagttttacccattccatagttaattctcccaaggacaggcaaagaattgactttttacaagttcactttaaaaaatggcacttcctgagacccagatttcccatttgtcaatgaattccgaagggctcctttcagagcaacagcttctcaaaatgaggagatgagggaggtggttgagcagtagttttttcttcctctcattcccccaaaaatgaataatgaaaacctggcacaaaatctcagaatatctgctcatctctgtgttgggtagagtaaacctacaaagaaggaaaatggcaagtgaggggagagtttgaaggcataaaaagaaagagttaataaatagaccaaggactgagactggaaaaggagacaataatgggcatgaaagtagatacactttgtttttgtttctgttttggctttaaggaggaaaaatcccatctggtacatgtttatcttctatgttttctaagagattctgaaatctatgtcgccataaggccttacactatgatcaatggatatttgttgatttcattttaatttcattcaaatcaagaattgtacccataaattctctccatgcccttataggggtagaaaagaggagtttgaatcctgggttcaccatgtacaaactttatcaaagttaattagccacttcccagggtcgcagcaaagattcagtgaaataacgtgcagaaagtgtccaatgcctgacatatattaagcactcaacaaaacatagttactgttattattcttgttctcattttccttccaacttccctgtctttaaagaacacagccccagccctttgactgtgacactatggttccataattctcaaccaccacacctcaacacatcattgttgggatcagcaatgaggtatgcctcaactaatgtgcttatgatatagaataacttccaaaatttttgaatggttttttggaaaataaatgttattgaattcctatccctataaagctatccccatgataatatcactcttagtcatttacattccagtgagctctcaagtaggaccttctcccccaaacttactgccggccctaaccaataaagtcacatttactatataaagagacttaagtctccattcctatttagaactaagatctgagtctaaatctgcataagcaaaaactcactaagttattctactaaatagaggattacaggtctatatccctccagccaaaacattggcagaggctttaaaaggacagttttttctttgacatgctcaaattaggcaggaccctgctccccatcacccccgccttctcactaggtctaagggaaaatgggaacagtacgatcagcacgagccctccgtgtctgtgggctttttccatgcctccaaaaaacatcatcttaagaggagatttggagtttcatgaacaatttcatgatatctgtcttctgggagaattggaaacagaaactgagctgtaaatgctagactgtcatgcctgagagcaacttccattttccattctggattggttttaaaatatggtatcattcccagaacctttaagaataattcaacttttacctacccaccctctccctttgcttttaatcgttcccccaaatcagatgccacgcaagagtttaacattcaaatctgccaaaaaatataaaaaactagtgagtacaaatctgttaagagttagagacagtttatggaaatacatattttaagtactctgcattaaaaagaaagagcacattatctgagacatgcctcactggtgaccccaacaacgatgtgttgaggcgtggtgattcagaactacagaactacacagtatgaccatagagggctggaggtaatggctaaaaacaggaaagtgggaaggaaaatgagaactgcgaataataaagtaagtttcattgagtgctcacttgcaagtgaacatcatcttgtttttgtttggagttgctatctttaatatttcaaggaaatacaagaccagcagagggagttggtgacaaagggattcatgcaccaaagcagaatccgaaaccaatgttggtctatagtggctgaggaataaagaaagtaaattccagcagctcccggaacattctgctgaggttttcacagcatttcaagttgcttcagaacagcaagggaaacctagggggatccctctgggagcaaacgaatagagaggatatgctacgctgctgtgaatgagctgtgagagggcataaatccatagggcatttcgctctgttcaagcaacccatgatggaatcaccaggattcttcacatataaatccagagtaagattttcctttaaaagtaagtaggctttcacggccgggcgcggtggctcatgcctgtaatcccagcactttgggaggccgaggcgggcggatcacgaggtcaggagatcgagaccatcctggctaacacggtaaaaccccgtctctactaaaaatacaaaaaattagccgggcgtggtggcgggtgcctgtagtcccagctactcgggaagctgaggcaggagaatggtgtgaacccgggaggcggagcctgcagggagccgagattgcgccactgcactccagcctgggcaacagagcgagacttcgtctcaaaaaaaaaaaaaaaggaagtaggctttcaagactagcccttattgtttgatgatataaggacccctgcagaatgtctttccagggtccttctcatccaggaaatcagaaatgtacactacactcttcagtaaccacccatcgaccctcgccccccatgctgtaagggtggttgagttatttgatgattaaatgagagttggatgctacctgacacccttgcaaatcagagtcctcatacaactagcctcggtatagtgacactttcaaaagcaataggaacctactctgaacaccaaaaagaagaatgcggctcttcacttcgggttttcttgaagggataatgagaatctatatgctgcttcaaacaaataaaacttccttaaaatctgccttagacatccttctctttcctctaaggtttcacactcatgctagctacaaaatccctccctctctctcatgtaacgttgcacacattcgctctttttttaccctgtccccaccagtttgctctctgtccacctactccatgctcccaacttgggaactgccaactgcatgcagttccagaaaattaagaagtccactctctcagccaagccttttctcatcactttcattgcagtaaatttatattcagagttatgcaatgaccctaaggtatagttagatgagttttgaaatgtgtatgtgcaatcaacacaccaatcaaaatagagaacatttaaatcagcccagaaggcttccttgttcctcctcccagtcactcccacgcccctaagcaaccacagctttcatttctatcaccatagattaattttgctcgtccttaactttacataatgagatcacacatgtgcttttttgattcttttttcattcaacataagttttttgagattcatccctattgtttcatgttttagtagtattctattaactctatacaccataatttatttatccattcaccacggacatctgttatttccattttggagtgactatgagtgaagctgccatgaatattatcgcatgagtctttttgcagacatgttttcattttgggggggtaaaaatctaggagcagaattggagggtcatagggtacccatctaactgctacagaaactaccaaaacacttctaagtattttaccagtaacatatgagttccagctgctgctccacatcctcatcaacattggtgttatcagactatattcttccaatatgtagcaggcctttttattttcttaatgatgtcttttgatgagcaaattttttaaattttgatgaagttcaattttagcagtcttctttttcttttatggtctgggcattttgtttcctctccaagaaatacttttatctcaaaaactgcactgtctcaaaagtgccaatggtggccaggtgtggtagctcacgcctgtaatcccagcactttgggaggccaaggcgggtggatcacttgaggtcaggaattcaagaccagcctggtcaacgtggtgaaaccccatctctattaaaaatacaaaaaattattctggcatggtggtgcgtgcctatagtcccagctactcgggaagctgaggcaagagaatcgcttgaacccaggaggtggaggttgcagttagctgagatcatgcaacttcactccagcctgggcaactgaaaagaaaaagtgcaatggtattctgctgtgttgtcttctagaagctttgaagaaacttttaatcttgggtctataagcaatctcaaattaattttcatgtacagtgtgagattgtaaagtttttccccaaacagatgtccaatcattccagaatgatttattgaaaagactttctttttaccactaaattgccctggtacccttgtcaaaactcaatgtgaggatatctttctgcactctaattctgttccactgaattatttgtctttcttaatgcttattctgcactctcttgattaatatagctttatacaaggttttaaatcaagtagggaaagttccccatctcccaacccccaaatgtttggctgtcctagatccactatattaccatatagattttagaatcaactcacaacttttataaaatgagcttgttggaaatgtcaattgggacagtgataaaggtatagatcaatttgggaagtagtgacatcttaaaagtactaagtataccatattagtctgttctcacactgctaacaaagacatacctgagactggtatacaggaaggaggcttaatggactcacagttccacatggatggggaggcctcacaatcaggtcagaaggtgaatgaggagcaaagtcccatcttacatggcagcagggacttgccttgtctcaaatgagggtttggacttggacttctgagttaatgctagaataagttaagactttggggaactgttgggaaggcgtgctttgttttgaaatgtggggacatgagatttggggtggggacacagccaaacatatacactaatgcatgaacattatatacctctccatttatttagatctcctttattttctctcagcagaattttgtagtttccagtgtacaagtcctcgtgcattttattaaatttattcttagttatctgatttttgatactatttaacaactcaatttttaaaatttcatttactacttttatgctaacatatagaaaaacaattgcttgtggtatattgaccttgtatcctcacattttgctaaattcacttatttgtaaattattatagattacttaggcttttcaacataatcatgtcatctgtgactaaagattattttattttatcctttccaatattttgccttttatttcttttccttgccttactattctgacaaggaccttcatattacaatactgattagaagtggtgagaaaagcacatttttctttttcctaatcttaggaggaaagcatttagtgtttcatgtaagtataaaattagctataaattttgggtagatgcccttattaggtcctattttcagtttgttgacaactgttttattttaatctcaaataagtgttgttttttcaaatacttttgctgcatttatttagatgattatataaatttttctctttttttctagtaatgtggctaatttacattgattttcaaatgttgaaccacttatattcctgggataaactccgcctggttttatgatccttttcatacatgattggatttgatttcctaatattttactgaggatttttatgtctatgttcattagagatactggctgtaattttgtttacctgtaatgctttgatcatgttgtgatattaggatgatcctggccttataacatgagttgggaaacattccgtcgccctatattttctgagtttgtctgacattagtaccagtaaactatttgggcctggtatttcaaggaaaaagagtgggtaattattaaaaattctatgtcttaagtagatacagagctattgtgatttttcatttctttttgtgtcagttttgtaaacttggttatttgtccatttcatgtaagttgtcaaatttactgaaacaagtttacataccctttttaaggtatgtgggatctgccattatatcctcactttcattcctgctattaataacttatcttccctctctttttttcttgataatgcttgctacgggcttatcaattttattagtattttcaaaaaactttcatatggtaattttctctaatatttgtgttctacttcataggatttcctctttgtaattctttgcttctattttctaccttgctctgtcttctttctttcttcttttctaatataaatatgtaaaacatttccctctaataattatttaactgaagttcacaaatttttatattgtatttttattaccattcaattcaaaatattttctaatttccattttaatttcttctttgactcatggattatttagaggagtattgattgattttcaaatacttgggatgttttcttctttctagaaatcctatggttatttatttctaatttaattccattatgatcacagaacatagtctatgacttcaatcctttaagtgcattggtactttttcatggtccaacacgtgatctatgatgctgaacattctatgtgtacttgaaaacaatatgttctgcaactgttagatagaaagttctgtaaatgccaactgtgttaagtggaggaaagagttgttcaaatctatattcttggattttttgtttgtacttttgcctacttgaccaatcaactactaaagaagggtgttaacatctctaatttatgtgttttattctttctccctgcacttttatcagatttttccccaagtattttgaagctattattaggtccatgcgcatttgggtttattatgtctccaatgattaattgaccttttatggttatgaaatatcttcctttatctgtggtaataatttttgtcttgaagtctacttcatctgaaaagacaaagccacaccagctttatcatgcttattgtctaggtagtgtatttgctaacctgtcattccctgctacataatgtgtttcccctaccttcactcacacctctacccccagagtccacccactttaaacattttctcttggcatgggcatggtggctcatgcctgtaatcccagcagtttgggaggctgaggtggctggatcacctgaggtcaggagtttgagaccagcttggcaaacatggtgaaaccccctctccactaaaaatacaaaaaaaattagccaggcctggtggcggtcacctgtaatcccatctgctcgggaggcagaggcaggaaaatcgcttgaacctgggaggttgaggttgcaagtgagctgagatcacgccattgcactccatcctgggcaacagagcaaaactccatctcaaaataaataaataaataaaaataaaaaataaaattttatctttatctttgtttggtttttcagcagtttgaggatgatttgctgaagtgtatttttccttttattttccctgtttgggatttgctaatgttcctagatatggacactgattttttttcccaaatttgggagattattagcccttattgattcatatttattcatatatatatatatatattttcattgctccattcactctcttctccctaagggatgccaattatatgtaagatagacttctaaatattgtgccagagtttactaatgctttaaaaatattttttaaatcttttttcttttcattctacagattagacttatttcagatattatccttttcatttctgaatttccttagctaattttcatagtttttattttctactgtcattcccacatattctctcattagaaacatgctgtcctttaagtcctcgaacacattttttagcagctgtttaaaagtccttgtctgctaaatctaacctttgtgtcaacttgggttatttctcagggtttgatgttgggtcacacagtttcatgcttcttaacatgtctcgtaagttttttttattgtatgctgaatattgtgagtgatacattgtaaatagcctgaattatgttgtctccctttaaagagttgacattttgtccttaggggatagcccttgcttgaaggcataatccttattgctaaggtgtgggttttctgtaatctcaaaagaatgcccaagttgtacagcgaatctcttcacctctgtcatggaaaaccaattatctcctagcactggatgaactctggcttctccatgtcagctctcttcccaactgcatctgttctctgctgcacctcagagtctgggccagcatatgcacagcccaggcctaggccatggtcctatggtaaacacccacgcagattctcagaacttccctctaagcaacttccttttctctagcactctacccacaaagcttagcagccctcaagtcccaatcactgcctctcagttcagcaagaacactgctcctcaaactatgcctcattttgctgcaattagaaaggcgccctgaatcaaagtgccagggccaacaaaggtatcattcctgttctcttctctcaagaatcccagtcctgctctgcctattgtccaacacctgaaaacatctgtctcatatattctgtctgattttatagttgtttatggtgggaggacaagtccagtattggctactctgttgtagctcgaagtgcaaatgatatagctcttattgtttttcttgtgaaaatcaaccccacccaagaatgttaatgactaaattccttcatctcattacatcttactccaggaaagttttttggaatcctgacaaatctattacacagttttctctcagaggacttacatgttatatgtacttgtggaaagaaaatctcttctgacttgcagcatagatcctaccttcctttcttcttttgctattgtgttggacaacattgtcaatttcccaatggcatctgactgtatatcccacagtttcttccaacaaatcttgggactgagacataagtgactgcgttggaaaggaagttatcagcatcatgttccaatcttcccctccttggggtctctctcacaaaagaaaaaagatgccacatctatcaatcattttcctcatgaatgcagtgagataccaaatactgcaagaactatgaaagcagccaccctcccaagttctaggcaatcctgagactgtcccacacatactggtgtctgcaatgagtcaaagaataaatgctcacaaaaatctgttttatggcaacatgagggaggacaggatacacaaggaaatgcccaaattctgggactcaggcatctttcgcttgggattgagggctctctagctgcttcaccatcatggggattttcttacttgttacaaatctggctttagaaggttgagtcatatggaccttaacttctatttctcccaggtatcttgtatacgatctctgttaatttgctattgaaaggtttctatgttctcctccttttttatatcaaccccaacttgcttaaccaagagcaaaaacttggagcctctcaggtatgtggtggaggcagaggttatgtgttaactctgaactattgcatagccctcatccaagtagacattccaagctgaacatacacataaaaccttttctttttcttgtgacaggaagtcctacttttttctaaatcccaggactgctctgcctttccacatacttgttttaaagtagtcacacatttcaccagaaacaaagtcctggttgctttctgtcacagctgagagcactgactctgaaaatcccccactatgccagtgaggtgccccacacaaccctgagactctccccctcagtcttggtacagtgcttcccataagttcctgcagggtctgggagggtgcagttgcaccagtgcttgcaaatatctgcttaatggcaaactccacagtggcagtccctgggaaaccattttctattggtaggtcagagcaaaagccctgcataaagatatgcattccctttactaaatcctgcattttctcttttttcatgacccctttcctcctcatctccttacaaatgcaaaagtttctataactagaccctccctgctgctcctcccacccaccccaagtaccgtccacctctcaccctcagactgcccatgtcatggaaagtttctctgggtttctgctcaaatagtatctttcatctctgtacgtatttgatatggaattaaccttagaaaacaagtttaagaatgagaaagttaatactaatataactttaaaattaacttctcaatacctatgttccagaattttagtgataaaaatgcaaatttaaaacacttctctcatgtgtgaaatacattcagccagatcattttaaaattacattaatcatattatctcatttgtcactcaatgattactctgatttaaatattatgatggtgccagagctatatttaatgagcaaatttaataagaatagcactgaaactctatccaagaagcttaatagtccttgaggaaaactttcataggagatcaatctataatttgtatatgttgaccacggaaaataaaatgtactggcttttcctaaaataggccatcattattttgtatataacttattttttaatttaatagtttaaagttaaaaaggaaagatttaagaattatgagaggaaaggtcaaatgcaataaagcaagatagccaactagaagcccttagcactcattcccacacaaatacagccaaaacaaaaaataaacaactacatattgatgaaaataactaaaggagagtgctggagtacatcaaaggaatagcaaaaaccctgtggagcacagtaacctacgacagacacaaagaaaagagaagaaaacatctggcctccaccaccccatcacccagttgggatcagcttggaactaggaggtacttttttttgcggagaaaaagtaagcaaggggaccccagcagtcctcatcaccacttttgacacctacagacctcaccactgggaacatctgaggttctcacagaggctaagcccagatgagtgagctgcgtggagttcccctggggagatgatgccttggatgcccagagcagtcacacaaaatgggcctgagataaaggagctcatcatctcctgtggaatcagtgccttggacaagccaagcagtcaagcatctcaggactaagctgacgtggagccccatgtcctagagaaaccgagcattggctgagctcagacacctagtcctacaggccaagtgaccgcagtaccctgtttccctggaagtggagtagagtctgggctgctgagtccagggagtggagtcattactgtgttgcccctgcctcccagggcccaagtgacagctatgctccaccattccagagtccttgctgctgccatacttgaccccacagaatctgagatactgccatgtcccatcatcccagggtccagagtcaccattatgcagtgtcttatcttctggggcctgagtttccactgtgccttattggttctggttcctaaattgtgattgtaccctgttcaccgaactcaaacctccagagaatctcttctttcccagagacaggccagtaccgtgctctgtccccaagggtcagctacaacctggcctcctgagcctgagctgacaggggattcctcagagtaacagatcccaacgttgtgggtaatcttcatccaaacatgccttggagactcaccctgtaccccaagaccctggtgccacaataggctcataagctcctgagcacaggactctggctccacagccactctgagcatttgtgtcctggaacccagcaccaatgccgttgcttaagggtcatgtcagacatgacaccaagagggatcccctcaactaagattacccattatagggaaaacaagaagaaaaggtcccaaaagccctcacctctgaggaccctaacaacctatgctcttgccaccactgccacaaactcctgtagcctagcccactgaaacaccatagtcatcactgacattgattgcagctgaagaacctgcacagatgctataccactgcatctacttggaaccaaagtcatcacacccttcccaactggcacactaagacccacctgtagtgaaagtttttccttacaaaagccactccgtaaagtttggaagaagtgattattccaccagatgctcagccagcaatgcagggccacaaaagaatgaaaaagcaaggaaacatgataccaccaaaagaacacaatgtctagtaactgaccccaaagaaaagtaaatttataaattgcctgaaaaaaaatttaaaataataatcttaaggaaactcagcaacatacaagagaatacagatagaaaattcaataaaatcaagaaaaaaattgattactttaatgagaaattcagcaaagagatggatatcatacaaaagaaccaagcagaaatcttgaagctgaaacattcaacgaataatataagaaataaaatagagaatttcaacagtagactacatcaagaagaaaaaagaatctctaaacttcaagataggtattttgaaaatacccagagggcaaaaaaaaaaaaaaaagaaaatataatgaaaaagagtgaagacagctgggcacggtggctcacacctgtaatcccagtactttgacagagcaagactccatctcaaaaaaaaaaaaaaaaaaaaaaaaaaatgaaggcagcctatgggactcatgggacaccaataagcaaacagacattcacattataagagttgcagaaagagaagagaaaaagatagggacagaagcttatttaatgaaataattcccagaagtttcttaagtcttagaagagatacagacattgacatccatgaagttcaaaagtctccaaatagattcaatagttcaaaggggtgttctctgaagcacattataattaaccagtcaaaaatcaaagacaaagaatttttaaagcagcaagagaagtgtcaagtattgacatatataggaatccccactagactactagtgaatttccagcagtaaccttgcagaccaggagagaatgagatgttatacgcaaaatgctacaaggaaaaacaacaaaaactgtcagtcaagaatactatacacaggaaatacgtccttcagaaatgatggaggagatcctgccatttgctataaatgccatttgctataaacctggagaacattatgctaaatcaaagaagtcagacacagaaagaaaaatattgcatgatctcacttatatgcaaaatccttttttaaaaggtcaaatacatagtgatagagaataaaacagtggttatcagggtagaatagggatgggttatcaggtagaaataaggagatgtaggtcaaagaatacaaagtagcaaataaaaagaataaacaagtctggggcggggcactgtggctcattcctataatcccagtactttgggaggccgaggtgggtggatcacaaggacaggagttcaagaccagcctggtcaatatggtgaaaccctgtctcttctaaaaatacaaaaattagccaggtgtggtggcgcgtgcctgtagtcccagctactcgggaggctgaggcagaagaatcgcttgaacctgggaggcagaggttgcaataagccaagattataccactgactccagcctcagtgacagagactccctctcaaaaaaaaaagaaaagaataaacaagtctgaacaagtcaaaagacctaatctacaacacaagctatagttaataacagtgtattatattcaggatatttgctaaatgagtagattatagctgctcttgccaccaggtgaagggaaatggataactatgtgagatgatgaatgttaatttgttccactacagtaacaattttactatatacagtatatgtatcatataacatcatgctgtacaccttacatatacaaaatacattttatttttctaaaaaagcctgaaggttttatttatagaaataaagaaaacacaatttatttagtgtaaaaacacagaattattcttacatgcaattgacccaattaacattttataatgtaatgtttatgggtttactttcagaggaatagagtttaatatagggcttaaataatttttaaaaactgaattctatgtactaatttactgtatcatgcattctcaaatatgaaataaatttgatttggtttaattataagaagaaagatagttataagggaaatacagttcccaaagagagagagaaaaaaagcacaaaattgctaagatctctttttccaagtgaattctctcttgtcaacattgggaataaagagaaacctctgcatgtctctaaagaagcatctctctgagcgcagagcaaaatcttctttctcacctcctctgtagacgacccaacaacgttttacccccatcaatttcagcatgtcctcaagctgagccttcagagtgagtaatcctcttttcagtctagctgcctttctcatccccaccatcaagacatttggaattccagaaaaagaggaagagaaggaaatgtttccactgagtggaaggatatcactctggacccaaactcaatttcaatgggtccctcaccgagaaaatgttcctcatccataatatacgcaaaactgaaatcttattcacacttgataagcagtaggttgtccagtcaatttaatatttcagcaaacgagcacttttgaaacaatcaaacatagctttataggactaaaatgtgggagatcatttcagtaatcccttcttctaagcttttcatacgttcttcctaagacaaaccaagtctccttgaataagaatagtatctggcatataacaaatgttcacataagtgtttgtattattattaccttgttgaattactgaaaaaccctgtggaatgctgaaattctaactaaactccctgataaagtagaaaacatggtcttgttcgacacagtgacatactgcttacttattgcaactatgcaaatcatgggcgctcaataaatttttgttgaaaagcacagaagtaagaagagaggagaaagagaaatagagaggaaaaggaagaggaggaggaaggaaggaagctacccagcattgacagacataatctttacactggtagggaggttagaagagagcaggcttatttttaattacaagtctgattctgaaaggattatagaaacatccaaccactggagccaatttatttctaaaacatgtcctatctgtgcactttggcccatgacattttgtattcctggcatgcttccttcttcctttccaactattaacaatctatccattccttaagcccaatttcaattatactcactccattaaatgtttcctcttcttccaaagtagaagcaatcttttcctgttctcaaatgttaagagttatggtgtagatgaacaccactttttgtcacctatatccagttctatattgctacttatattttcatgaatttatttttgatcaccttaaataaactgtcagcatctttgagacattgcattttagatcatcaagaaatgcaagttttatataacatctcatttctctctgatgctggatatctccaggtggctccagagccacatgctccacctttctcccacttgatctgtgtcccagaaggctgacctgtagggatggattatgtcatcagctcccttaccatctgacttccagtaggttaggccaatgggggagccagtgagtttgggtacttacttctccagttccttccctgcagaaacccaagggctggctgaggccctcactgaaggtcagaacccctataagatggccctccttacctggcctccctgtccttcacataactgtgccctccactttagggtttacttctgttactaaccccaaagcactgcattactttatagcttcctaccatgcccttacccttacccttgtaaacagaacttttattaaacttttcttaaattatactaatttgcatgctctgtcttcttgagaccctggttaatatatctgctttattttccttcttgtacttaagatctaaaataatcttattcatttatttgcttactggggtttattatcaagactcttctcctccctacaaaaaaataacaataaattccatatggcaggccttttttcttattcaccactatctcctcagcttctagaatagggcagatagagggcaaacagtcaataaatatttcttgaagaaataaatcaaataaatcaattatatatatatatatatagagagagagagatatagatatatgttccaattcagagtgatatctctttatgtttagaagaagattcgaaaacactagctcagttactaatctactttttcaagatttaaaacaaagtactaactcagagcttaaatctagcatttctttaaacccaatcaaaacacaaaatgcttaacactataaattatcctcctaggttgagtttctaacattaaaggaagcaaagcagaaaattcccagagagtataatataaagtgaagacaaaaaatatctccatacagctttcttttttttttttttttttttttttggccaagggacatatgataactgccaaaaattaggccgtaattcaagaagcattcctgacatcattgtacacttgtttctctactcaaaacacaaatttatcactaactgtcactggactgctatccaactacaacttccccatctcatgcataaaactatgcttttaaagtactaaaacattaatacccaccaagatgggggataggccttttcttacatgaatatgtaaaagttgatttaggtattcgtgatagagaagtgaaaggaaagactgaaaatgagaccttgctcacctctttcctaaatgggatactgcaggttataaggaaaatcaagagtggacagagaaaagggagtttagaatgatctgaacctgtgttggcagtcatgccattggggaacacagccattcaacagtggaagtacttgccttccttgacagctgctaagaaggtgatgccgcggctacagctcccagatgagctcatgtgggtatggcaaaaggttcacccctgtaacatactgtcctctttagcagctgttcaactgcctaacacatggctattttctctgcctaaatcagtatcatttagttatactactgaagaccgggagggacctgatataactgatgctatttgcaaattaatagatgagggaactaaccataaaaattttttcagaaatctgatactaatttgaacagtattttcaatcaattacaaggattcatttctaatcttctctcaaatattgatgaaacatttcataatttgttttgacttatacatagatttaattgcatatacatttaattggagcccatgactcattagcaatagaatttcctaacttgctccaaattttcagtagcctcaggtttcccagagacccagcctttctcagttgccatggatttcctgcctctgggggtgccaccacattattacttagaggcattcctactcctaaatctgctcttgaatgagctggcatttgacagaattcctcctttttggagaagcaaccagaggcagtctgagattattcagatatttatctttgacttccggtactgggggaaagacagaaagacttagctaaagaatctcaagtaagcctgaccttgggtactggagacctaaagctacggtatctccaggtcccgagcgtcagtaagatggagctaattaggaggaaaccgaggtcggtgaggaaaatgactatgagatcagattcagcccaaagcgtggccaggaatcagctccacccagaggtctccaaaaagtggcagaacactctgagttttctccaagggaattgatggacagacttgtaggaagaaaacataaattcacttaaataagttttttacctcttccattttattattttttaaatatttttatcttatatattttaaattcatattttatcttctatattcatttttatttcatgtatacattcacatttatacacctgtatacaaaattcttgcacgtggtttataaggaaataaacatatactggagatgagtactcaaaacttttattaataggtacattcagtccaaaaagtttgaaggctgatgcagtagaactgagatgagcacaagagaaggggtaggaagagggcgctaagtcaaatggtcatgatcagctgtctgaaagttggggagatcccacaggaagagagcccagagacgggggacaggataggccccgaggacagcctggaaggagggtccacaccagaaacagaggagcacagctgcatcagccccgtcttctatttcctgccagagggacgcagttgacctcacagcgcccccacctcgcatcccaggatcattagcagctgacagcgcagggaggctgtgtttatccaacatcttttctttttcttttccttcaggcctctggtgttattccccacccgacgaggaatacgtcttccttctgttattaaatcttcaggctccctgagtcctgctcctattgtttcctcttttgtgccatctgatcctccaaacaccttgtcctaggctctagccggacatttctgacatctcaagacttgagactttgatttctgagcccctcagatcacacggtaactccacccactttcctaagcaaccaacttggtaccacagaagaggaactggggaaaatcaaactgaataaaaacacttataaataagctagtttccccctgtgtaacagcacggtttccccggtgctgcttgtttaaatctccgagctggcggcgccaggcaggaaagtgtctgctccagctcctcgctgcaccttcctcacataatcttggcgaacgttcacatttccagtcagcgtggctcattttatttcccagatgtttttacactccgaggccaaaactaacacgaaatcgctcctttcctgtcacccccggcctctgtctgtccccgtcactcccgtcctcccattaccctctcccagctgcagggatcacggacgccaagcggcactattttactaggagctgcaactacaaccacaggatcgcggcggggtcgccctctgtgagaagccacacaaacgcgaatcacatggctaaaaccacacaaaaaccacctgtcaccacctcaggccggtcccgagtgtgtgtgtgtgtgtgtgtgtgtgtgtgtgtgtgtgtgtgtgtgtgagagagagagagagagagagagagagagagagagagagagagagagaccagtcaggggaactgggagtcattcttcccgtttacagtgcagactcccaagtgcactgtgagcacatttttgacagtttaatgttcaggattagtagccttaccagacttccttggccaaattcaagaactatttccatttaagccaaagcactttgttattactcaacagttgttttaattaactccctcagagcaactgtggccccaataagctgcttcaagggagggatctcacgatattttttgacctcacacgagaaaaacctacaaacattagtagtggactggttaatctgagctgtttcagaaatcaaattgttttatgcactatttgggacatgattatactaaaaacaaaacaaaaaactattcattgtttatctgaaattcagatttcactgagcaccctttttctttgctaaactgaacaatcctaacatggccagggggaaaaaagtgtcctggttctgtgagaatcagtgttgtcttaggaagacctggaaaacaaaacataaaatccttctaatagcagaaactatcttaaaaatcaactaggctttcaattctctttctatattctactaccagaatatggtattttctcaactttcagagaacaaactaagttaattaaaatttctcaatgttaagctttttttcccaatattttttctaaccatttcatctttgcttatttgccagcaaacaccagtggatgtcagaaaaagtgaacaatccttaaatgatattagtaggaaaaatgacctacccattcttagtttggaaggttgcctttttctgaacaaatattcttatttttgtaacatttatattatatggtcaaatttctgtcgtacaattatttctagttaatacaataattttaaatgcacctgtaggtcatggtattcttctagggatatagttatcagaataaatgtgaaaaccagcaaataattgcatgtatttctttcatattacatatgtagaacccgaggctcagaaaacccatgaatgtgcccagagttaggcacatggccccgctgtatcagcactaacgccaggtgtctcagtgcccagctcactacctgattaaaaacaggacactacttttcaaatggcagaagccccttgcaaggtgtcgccagctgagagtgcctttaatccactcactaagactcccttttcctcttccaccatttagaaaggatgattatcacaccactgcagctaaaacataaaagaacatatcaaaggaatttgtaaagtatttattaaaaacatttatttcagaagagccaatgtaacaaaattttgctattgcaaaattgacacaaaatgccagttgttctccccttttagatccatgcactctttttagttaagcattttgtaatatctccttttctaccctgatataaattttttatgacatcgatataatgtcctagctataatataaagggaaaataaaagtgattcatagtaaaatatcatgtatttcaatatgtaattatgtaggtatgactacaataggaaacacaatgagatagatatttgcacatatttttaatgagtaagtttggagttatgagaagacaccattccataagcttttgtacatattttacaatttgaaataaggactaaataaagctgtatgcatagaaaaacagcatgaatgctgaacatgaatgaatgcttcatatttgacattttaaaagaaaaaacaagcctatatgcatgtgtatgtgtgcatgtgggtgcacatgcaaacacacatgcaatcagcatgaatgtaatagctacaaaaataggcctcctgagtaggtgactcaatttaataggcaatgctgccatcagtgacgcattttgcaaaatggtaaagttacaaataaagtttcatcttacctcagtttacttagtagttgtattcttgggtaattcaaagtatataaagtcagcacaaaaattattttgtgtgtttatacagaaaatagagtaaggttctggacttacgtaggttattataagcaggtttttcacctgcttggatatcaaactactcattcaaaatttatgaggaactcaagcaacttttacattgtgtgaaaaatgagatgcagcaattatattttaaaaatgctactttgtgaggctgaggcgggtggatcacctgaggtcaggagttcaagaccagcctggccaatgtggtgaaaccccatctctactaaaaatacaaaagttagccgggtgtggtggtgggcacctgtaatcccagctacttgggaggctgaggcaggagaatcgttgaacctggaaggcggaggttgcagtgagccgagatcacaccattgcattccagcctgggcaaaagaaacgaaactccatctcaaaaaaaaaaaaaaaaaaaaaaaagctggatgccattacgaaggatgtgcaggacactaaaggaatatagaggaaaggagtcatctaagtccatatgaagatggtgaagaaggtttccaggacagaaagcagggtgatgctagaactaaatgtttgaactagaacaagaccaaaaaaaaaaaaaaagccagagaagaacgtatgagtggacaaggattggggcatgagggactgtggtgtgtagggggaagtggacatatataggcagggaggagatgatgaaaaatcagagtatatcctggagtccttcaagctggagtgacatccagtttgcatttaagaacatcctttttggtagcagtacagaatggtttctaagaaggtaaattagataagttaggagattgttagtttaacacaggtagaaatagtcaaggcttaaaataacagccatgggggctgactgaacagggcagacttgacatatatttagaggtagatttgatgggctggggagaccagatggagagaagaagtgagaaaaaaaaggagtcagagttctccagagaaacagaaccgatgggagacagacagacagatagatagatagatagatagatagatagatagatagatagatagatagatagatacgtacgtacatacatacatacatagatggatgtgagagaatttatcacgggaattggctcacacagttatagaagccaagaagttccacaatgtgctatctgcaagctggaaaaccaaggaagagaatggcatacctcagtacgtgtccaaaaccctgagaaccagagaagacaatgatgtaactctcagtccaaagccaaaggcctgagatttggggcaggacactagtacaagtcccagagtctaaagactggaaaacctggagttctgatgtctacaggcaggagaagatagtcccagccccaggagagtcagtgaattcacctttcttctgcttttttgctctatctgggccctcaactgatgggatagtgcccactcacattggatgagggcagatcttccttactcggtccactgattcaaatgcaatctctttcagaaacactctcacagccatacccagaagtaatgtttttccagatacctgggtatcccttaacccagtcaagctgacacctaaaattaaccatcacaccctcatagtaggacaattgtagaggactggtagctatgcagggaagatactcttttggcatgagtggatggtgcatactaactaaactagtaattaccaaattactagtgcctacttgtaacctggtaattactactactgcatataatatatacactaccatcattggaaaaaaaaggctcagaagtcacactcactgacagtgatttgaataacacaattcagcaatttttgttgacatagatgctatgataggtattatctagatactggggaagcatagtgaagaagactcaaaatgcagctttatggaactttagctacatagaggacttatagaaagtatcctgagagcagaaactggttttcattgatataatcctagttgtagcatattgcctaacaaaaagtaaaaggtcaggaaatatttataatataaaatacttcattaagcatcgaaatactttattaaagaatcactcctttgcagtctgaaagtttcctctctttattagacccttctcatctgtgttaatttaatttaatttaatttaatttaatttatttatttgagaaaagtctcactctgtcacccaggctggagtgcaatggcatgatcccggctcactgcaacctctgcctccgtggtttaagcgattctcctgcctcagcctcctgagtagctgggattacaggtgccagccaccatgtctggctaatttttgtatttttagtagagacagggtttctctatgttggccaggctggtctcgaactcctgacctcaaaaaatccaccaccttggcctcccaaagtgctgggattacaggcgtaagccaccacgcccgaactcatctgtgtttaaacacgctttcgtctgctttaaaaaataaaaacactaccttgcacccattttcccttctagccacagccttttctctctccatcctgttgcagctgaacatttcaaaatggttttcatatgctctctttctattttctcacttctcacttcctctttaatctgctgcaatctggtttgaaatcccatcactccattgaagtaattattgctaaaatcacgaatagccaaagttgctacatccaataaacattttctatcctctttttatttaatctctcagcatcattcagtaaaggttgccactctttacttcatgttggaaagtttcttcgcctaatttcattgaataatactcttgattttcttcctacttctctaaatatcctttttcagtctcctaggctgatgcaccctcttctagtcaaccctaagtgttagagtccctccaaggtggggtcttcaatctcttcttaggttatactctctgcttaagctatttcacctctgcccatgatctcaagcccatacgatgccagcttttggattttatcacctgtccagcacattcatctgagctgtagtactctaaatacaactcttcagcatcttcacttgagtgaccacagctccctcaaactcaatatgaactcatcaagacatactggtcagaaacctaagagtcacccttgagtcacccttttctttacccagtaacccactccatcagcaagttctattgcctctacattcaaaatatatcctgaaacatccactattctccttctctatcagaaccctgggctattacattaatctccaaaggtctcccagtttccattcttggtccccatccaatccatactccacccaaaacaagagtgatctagaaaacatatatatacccattcatgattgaagctgtttagtaatcttctgttgttttagcataaaaatcaaagtcttctatgtgacctggccttgctgcctcaccaggcttgctcatgatgctctcctccctcagccccatgctccattccactagcctgtcaggtcttcagatgttctatgtgcttcctgccataggccccaagcaatgccaccctttctgcctggaattctctgtggccccactacgcttgtccaggcaattcccacgcattcaccaaagcttagctgaagggacacacagtcaaagaaacctgcctgtccaggcgtgaagtctccattgtacacactcagagcacccaagactcctcctccatagctctgtccaaaataattttaacagtgttataactgttaaaattttatgatatgtgaaatataactcacataccataaaatatatttattgtattgatttaaaatataactcataccataaactccacccatttaaactgtacacttcaatggtatttagtaggtatgtaaattttagaagttttcatcaccttgaaaagaaactctgtagcctttagctatcactgcctggccctccagtccactggcctagcccaatgctaacatttgaccaatttctgcctctatagatttctgtatcctggacttttcccatgaaaggagtcatgtgatatgtggtcctttgtgaccagtttctttcctagaacataatgttttcaatgtttatccattttgtagtacgtgtcagcacttcattcctttttatgacccccaaattatttttcatagttgaataattggttgtctctcctgctaaaatgtaagtcctacaaaaccagaaaccatgtctcattgcttcccatatcacacagagaggtgatcaaaaatgatttgttgaactactaacaaatcaaaaaagtgaacttggctcaaagcctatgcaatacatcactccaattttgaaggctaagaatccagctgagcttcttttcatcactgaaataataaaactcattctgcattctatattggtacattgtagcaataattagagaataattaaaatctaggaatataccctcaaatttatgttatacaactctgtacgcttttcttatatgcatatgttaaaatgcatatacttatacatacttatatgcatgcattaaaatgcatataaaccacttggggatcttggtaaagtgcagcttctgattccctaaatctgggatggagcctgagattctacatttctaacaatctcctgggtaacgccaatactgctggtccagggaccaaactttcagcaggagggtcttaaaatatcgtggtttatcttcttcaagcctgctggcattttagaaatatcttcaaatcatttttgataaattattgtacttacaatatacatggtaggagcttaacaaatgcttgatgaattagtacttagtaaatgtataaattgcttccagacataacaaggtttcattgctgcatccttggtctgacttatgtgcacaaacaacaaaaaaatagggctgaaacatcaagtaaaagcaaggagctttgaaaatcaaagaattcaagaaaaagaaaaagtaaatcagatcctaaactactgtaattcagggatataagtacaatacgttactaagctgaaagtaaaggacagtaaaaaggaagccagaaaagaacatcttaacattccaagcaaatgtgtgtactctctaaaaaagaaataaaaagcttcccttgtctttatgcagtgattagaaggagcaaaagaaaatgagacaattaggatgtgcaaaaatgaaactttacagtggataggaaaaactgtgcaagaaccagaaaatgaagatgaaagcaagctacagatccaaacaactaaaatgagatctcttttgagaacatgaatcaggcagacattaaattgaattactacatcaaaccagaatctcttggattttagaataaacagcacaaaggcacactgtgaagaagtaaatgaacactgacactggaggttctaaaaactgcaacttgtcagaaaccttatagggtctcagtaaattagctaggtctaagtgttcaagtaagcctttacttcaaatcagatgtttggcagaaaacagaaagattatcttcattcaagccctcctatttaagattcaggattgtgttatctgaaaattctgtgcactcctctatcacaaggtaatggcagctggaagtctccagctacagagacccttcccatgataatgacatctgcaacaggtacagagtcaaagataaccatgaacacaataattcacttctggcagctctatttcttttttaattaacatcttttccaagcaagagagaagactgcactgcagaaagcagattcctgataagcacaccttgacagcagcagataaacaggatcgctgggctgagggatcacggccaaataacaggtgacagcagttattcaccatggctgtgcaacaggatctagaggggtctaccccttcagtacagagattgacaatggaagtcatcccaaagtcacagctgaatgaaaggatgaacttcttttcaaggctccagccccatccgaagaacaggtagctctgtaccatgcctgcgttgtgcaaacgcttagagcccttgtggttatacccagtccctcaagtagcgtgtggaggactcttctctatatttaaaacttctaagctaagtaaaatttctgagctgagtgcatttcttccagataggataatttaatctaccgaggtcacttgcatttccaaatgttgctgaaaaacatctagaaaaagtacaaactcactgccctatttagaagccaaatgccaattagcaggtgcccttgatcattgaaaccagagctgtgaaactgacatggtagttagctcatttggagatctcagcctttaacacttagcaggaactgaatttccattccacccgatctctacattatataatagaaagtgcatttctggttcatcaggctccacttaactaaggcaaaacacacagctccgagggaactcgcaaagccacaatgcttaaatgaaccataaccaatttttaaacagagctttttaaaagtaatactgtcatcagcttctcagtgtgcacaccacagacccctggccccagccaagtgtggctaattgcatctttgcttggcccacccacagtctgagagctgttctggccctgggcaaaaaaatgaggaagaattcagtatcacactcaattttactgttaaagcattccattatcctgcctgcacctttagatttggatgctttggagcccaggctacatggatccctgggcctttctttgatcgccctcccctgccctattttttgtttccttccttgattgccctcttggcctctgtttttttctcaggattaatgtgcagcctgtctaaaccagaactacaagccagactcttccaggggcttcaacactgttccctcactgccaacccccaccccagaccccgcttctactggcctattgccaccaaagtccttgagtgactaacaggtgacaaaaaattctagttcattttatcgcatctaaaaatacactgatatatctcatgtcttcttcaattagtttttagtggcagacagtgtaaggctgtagtgaatacctaacagagaaaagttgccatcagttggtgacagtaatagtaccatagattctttaaagtcacctgttttctcactttgcagtctttagattgggaggcattccattcatcatgatgatctaggtaacataagggaataagcaggaagctacacaggtctccgcataaggttatatatgaagaattgtaatacaaagtgcaggtccacaaaggggagaaaaatgccatgtaatcagtacaaatatataactagatagaataagattgagtatttgacagcacaactgggtgactatagtcaacaataacttattgtacattttaaaataactggtcaggtgcgatggctcatgcctgtaatcccaacaccttgggaggctgaggagggaggattccttgagctcaggagtttgagaccagcctgggcaacatagtgagactttgtctctacaaaataaaaataaacttaaaaataaaataaaataactaaaagagtataattggattgtttataacacaaagaaaggataaatgcttgagatgatggattccccatttaccctgatgtgattattatacattgtatgactgtatccaactatctcatgtgccccataaatatatacacccacaaaatttttacatttaaatttttttaaatgccatacaaaatcagaagaggtagagatttctcagagccacagtgattcatgaatgtttcacttgataaatgtttgaggtgatggataggctaaacactgtgatttgatcattacacactgtatacatgtatggaaacatcataagtaccccataaatacatacaattattatgtgtcaattaaagaaaaatagcatgtttcactgagaagtgataaattaagtctagcctaaagctgcctccttacatattttaagttcagctttaaggtttctctgtacacagtgaactgtaatctaactggtgtataaatagactaacttgctcttgtaccaccacagagtttcagccactcacaggtgaaatgttcaaactgtgttaaaacaaggcaaacgccgagctctgaccaatctaacagctctaagagaagagctgttctgtaccacacttctcttttccgtatgtcactttcctttttccatccatgactattgcccgaccacgcagcaaccccagagccaccctgaacctattctggttctgagggctgcccaatttgcgaatcattctttgctcaattaactctgttaaatttaatttgtccaaagtttttcttttaacagaggtagcatctgagttatgtcttgaaagatgggaaaatttagtcttattgaagtaaaaggaaaggggatccaagacagagtgaaatgaaaatgccaacagacagaggtgatagtgtcctgatgagagcaaaggctctgagctagaaagagtgggtctgaagactccttctaccacctcccgtcagagagacctggggaaaagcccataatgttaactacctctctctctatctgtaaaacggaaaatataaaactttgtcacataggaatgttgtgattgaaataaatagtagaaacaatcaacaaaatcaactgctctatacattgagagcaaacaaggtatagattattcattcacagttcagctggagagaagtgcatatgaaggcagtctggagatgcggtctggagccatgccatgtggttctttgaactcaaactcaggaggctacagccattgaatagtgaagagcaagagagtcatagaactggagctgagcttcagagtaacttaatttggtagaaaaaggaaaggcagactggaagagagacacattggagatatgaaatctagtagatataaagcaagtcatacaaaaaaataacaagggtgaaaataaaaagacagggccaattctaggtgcgaaaaaacactggccaggcagaatggctcatgcttataatcccagaactttggaagttgaggcgggaggattgtttgaggccaagagttcaagaccagcttgggtaacacagtgagaccccccatctctacaaaaataaaaattagccaggcgtggtggtatgtgcctgtgatttcatctactcaggaggcagaggcaggaggattgcttcagtctaggagttcgaggctgcagtgagctatgatcgtaccactgcactccagcttgggtaacaaagtgagaccctgtctaataaaaacaaaaacaagaacaaagaaacaaaacataactgctgaggtttggtaaatatgtggttgttgaggccaatgaaaatgaaaaaaaggaaagtggatactgtaatcctagcactttggaagggcaaggcgggtggatcatttgaggtcagtagttcaagaccagcctgaccaacatggtgaaacaccgtctctactaaaaatacaaaaaaaatagccaggcatggtggcacgtgcctgtaatcccagctactcaagaggctgaggcaggagaatcacttgaacccaggaggtggaggttgcagagagctgagatcgcaccactgcacttcagcctgggccctgggtgacagagcgagactccatctcaaagaaaaaaaaggaaagtgggtaaaaaggcaaagctactgatagagaatcaaaagaaggggtaagtttaaaaaaaaaaggagatgaatgaaattaagttcagggttttagcagaatatttgataatggttataaacacacaaagaaatcttcaaaagcaagagtacaacctggcgatggtttataaactgggtcagttatgtcctatgcaactatgaggggatatcgtttaatgtctctaatctggcttatgcatacagctctcctatttgctggcatagaatgtgagtgcctattgggccacttttggtagacagaactggtgcttcgggatgaacacatgacagcaaattggagagccgaaatgactgttcatcatttttttggctgcttgacacctactccccctctttccttccttttgtgggggacatcctcagtgcatgtgttttgatgggacgccaagtcctacttctcacttcaaaagccagaggaggccagatactccctctcctcattcttggcagatagactgcagacaggtgtcctaggcttaaccaaacaaaatgtttccacacaaaaacttagatttgtgaggaaaggacacatggaaaaggaggcagcgtagaactcagcctcagcagcagcacccagcggcagcacatttcttagaccatcttggccatctgacccagctctcccagtttctgcccaaacccttattctcattttctagattttagatcaattttttaaagttacccaatatccttcccataagtttttttttttctattagatatggtctgtttccattgtcatataatttcaaaatttcaaaacttctcttctgtcatcaatgtctcctgtgtataacaagcatcatccagtagtgagtagccacgactctggaataaatccctgctgggcttttcccctagctctcctccttactagctgtgtaatcgtatgcaagccactcacacactgtgcctcagtttccacatctgcaaaatatgggtcataacattaacccatgtcatggtggtgtacgaataaatgagataatataaagggcttaccacagggcttgacacctagtaaccatgaatgttgggggtgattatgatagtgggatgacaagagtaatgtaggtgtctcctaaataagccatgatctctgtccttagcactttgggacctaagtgaagaggcaagaggcatacatgtgaaatattccataagtagaaaagaatggcatagcatgcttgcagatgacacaaatgtgagtctaaaacctgttgtcatgtcagttcataaaatgctcttttttcaaccagccatatttatgccactgaaatattaggccataccctacagccatgaaaagttttcagagtccaactgagaacttctgacaggctaagatcaaaagagaaaactagaaaaaggcattcatttcaagcctgggcagcatcaaaaatccaaaagcactccccaggaacatgagtctgtttccatgtgccctagggattctagtcaggcatatggagacccaaggcaggataaaattaaaatatgaccccacaggatcctccctggggaacgtgggaaataattcccctggatgaagagttaactccaaaaggagtctcttccgtagagcagacaatgctgtagaattcttggacctgttctcacagcaaaagtctgaattatgtatcttttaaattctaagcatgagttgtgtggtgtagcatctatcaatcttcttcaaaatgtatccatcccccacttatctaaaacaattacttataggaattcaatttcaggatcatctagtacattgcttttggggattcaatttcatcttttcactctaaattcccagttgttccagcaccattttttacaaaagaccatcctaccctgtggccctgcagagccacttctgaaataaatcaagtgtccacacgtgcaagtgcttctgggctctcttctgttccattgattgatctgtctattcccacaccagcaatgccctatcttaattgctatgcttttattattagccttcttatctggtagctcaagtctcctcaccttgtccttctttcaaacatctcaattattcttagctgtctacatgtttatgtgtattttagaatcagcttgtcaaattctacccaaaaaaatctgctgagatttttcttgggattgcattgcatctaaagatcagtttagggcagcattagcatctttacaatattgaaaactagagtgaacagacctcagcttggatgcaggcggggggagatttaacactaaattttctaagtttggacaattacaggagggtggggatcctgtttactgaaacaaggcagtgtgtatgacttaaagaaatcataaaacttatttcataaagaaaacataaaacttatatcataagcggtagtactggttcaacataccagtatcattcagcactaacatatacttttctcttttttagatacttatatatatattgttagatatatcacacatcttttgttagatatattcctagtcatcttcttttatattttcttattccttatattattgtatataggaatactcctgagtttttatgttaatcttatatattgtaaaaatcatcttataattagttgatatattttctcggaattctctatgcagataataacatcagtcccagttaaatctcttccaggacttgtaatggcgtttcaggattcttgtcccatgaggacatagggatatcatgattctagcctcaaagcccacagatggcctgaatcagtttttggtcacctggctctaagttcccagactccatgggccttcagccttctttacatacagaagctgaattcttagccatcactttctgctttcagaccatcccaagccgaatgcccaataagcctaaggctttggttccaatgaacatttaaaaaatttctgtcctatttgtattccacagagaggaaggtgttcatttgaagcctggatacatatttttgtttcatattttaatatttacctgccattgttatttgtttataaagaagggaatgcatcaaggtataaaccacctgtgccactttgtcagaagttaatacaaccacccttactatctctcgactatgggaaatgttttgaacaaatactgtgtgcaaaataattagcatgaagttctaagagatcataaaacaaatcattttaaaaagatgatgttagctattttgtctaaagagcaacttgaatagtccatctttttacatattctcctggaggctgcaacatggattatatcttatctttatattcctagagtcaggcatgcaataatgctaaagactctcagcttatctacaactatgatttgtcaatttaattttaaaaaattaaaataaaaactcagtggtgtgctggttgtcttaaaacaagccacataactttcagtgcctcattttctttatcaggcaaaagttgtgttgtaataacaactatttcaaataaaccatgatgacatataagttgggaggaaataataggagttaaaggtcttacattgttcagtaagagagtaaaggtcctaatttgttttagactttaagttaaatacgcatgttaaaataggccaggtgaacactaaaagaataggcacaaataataaaattttcaggataatggagtaatagaatgaaaaaaaaaaagatgagaaaaagacagaaaatctcaatcaatccaacagctgtgccccagatccagtcctaacccttctccactaggatctgtgcccttcaagcctaatcttgcatggaccacagactgaggttcctttgcttctggagtgagctcagccatccaataggagaaaggataagaaagcagagagaagaaagggagggaaagcagggtgtctactccctagctccattttacagggccttcagcttctagagggaagggtctacagatctctctctctatatatatacacctggttccagtaactgctaccttcctcagtgggttgaatcatgtcctgcaaaaagatgtgttcaaatcataaactccggtacctgtgagtgaaactttatttgaaaataggctctttgcagatataatagggttaagaagaggacatattggattaggcggaccctaaacccaatgactgaatttttatttataaaaagagaagaaaagggacttcagttacagaaccagagaggaaacaggccatgtgacaatggaggcagtttggaatgatgcagccacaagccaaggagggaggaaggattactgagagtccccagaagcttggaggaaatgaggaagagctcaaccttggagccttcagagggaccatggccctgccaagtacattcatttcggacttctcatctccaaaactgtgagaaaacaaataactagttttttttttttccttttttttttttttttttgagacagagtcttgctctgtcgctaggctggagtgcagtggcgtgatctccgctcactgcaacctctgcttcccgtgttcaagtgattcttctgactcagcctcccaagtagctgggcctacaggcgtgcgccaccatgcccggctaatttatgtatttttagtagagatgaggtttcaccatgttggccaggatggtctatgatctcttgacctcttgatctgcctgcctcagcctcccaaagtgctgggattacaggcatgaatcactgcgccaggccagtacccgttgttttaagccactcagtttgtgataatttgttgcatagccctaggcaactaacgcactcctctcactaggctcctgcagtggcctcgctgctctcactggctccaggccaccttctatctcttgtggttttcctacactttgtccatgccttcatatatagtcactaaacaacaatctacaaattgccaaattacccagtttcagagttcatcagtttcatgccagaaccttgaccaatgcagaaagcaaaagaaaaaaggaaaaaagaaacacaaaaatcttgacaaagagaaagtgcatatgatgatagatgaagatagtcaatccaaatatcagtcatagacatggataaacgtcatgaagtaaaactgagcaaaataaatcaagttacagagaatacatacaaaattatatgtttacatgaaattcaaaaactggcaaataatgggctgggcatgatggctcatgcctgtaatcccaatactttgggaggctgaggggagatgattgcttgagaccaacctggacaatagagtaagaccctgtcactacagaaaattttaaaaatatagccaagcatggaggtgtgcacctatagccccagctccttgcggggctgaggtgggaggatcgcttgagcctgggaggtggatattgcagtgaggtgtgattgtgccacagcactatagtttgggtgagagagtgagaccctgtctcagaaaaaaaataagtcactggcaaaaataatacaatatattgtttaaattatacatattgaagtagtaaatttgatgagaaagattaatacaaaatttagaattatagcttatagctataaaggtggaatacagaaaatttccaaggtgttggtttcttaagctgggtaaagggtacatgagtgttttttttattataactaacctgtacctatatgtattctgtgtactcttatgaagataatgtgcttcccaataaaaattgtaaggttaaaaagtgagttaacattatcagtgataagccatgttgatagcatgtacttctgatatgatgtgatgaaaatggtattttacctctgtggtcttctttccccataatttatcagcccagtcaaatcctgagaaaaatgtaggacaaaccccaaattaagggacattttacaaaatacctgatgagtaatcatcaaaactaccaaagtcatcaaaaccaaggaaagtctgggaaactgtcacagaccagaggaacccagggagacatgctgcataaaggtaacgtggtgtcctgaatgggatctcgcaatggagaaaggacaagagggaaaactagggatattaagaatggagttcaatccatagtaatgcaccaaggtttgtttctttgttttgacaaatgcaccatggaaatatacgaggttaacaatagggaaaactagatgaggggtacacagagaatctgtactatccttgcaattcttctgtaaatctaaaacaattctaaaaaaattataaaacttattagaagcaaaaacaaagctaactttttaagattgatcagcaaattctcagtcatcacagttactatgccagataacatttaaaaattacagaaattatggctgggcgcggtggctcatgcctgtaatcccagcactttgggaggccgaggcaggcagatcacgaggtcaggagatcgagaccatcctgtgttacacggtgaaaccccaactctactaaaatgcaaaaaaattagctgggtatggtggtgggtgcctgtagtcccagctactcgggaggctgaggcaggagaatggtgtgaacccgggaggcagagcttgcagtgagcccagattgcaccactgcactccagcctgggcaacagagtgagactccatctcaaaaaaaaaaaaaattacagaaattgtaagactaatattactttagaaataatgaatacctctggccaataaaaaaagggtacagattttatatcctctcatttacctcctaacaaaataatccaaattgtacctaccagctaccaaaaattaaaaccaataaactagattagcatctgaaggttttatagaggacttgttacacaaatgttaaatgcaagctgcaaaaatttatcttgttgttagtgccagtattatttgagtctgagcttgatgagaaacctgaaataggctcagtgacagcaaaaagtgaaggtcaaggcagagtggaaagtaggatagctaagtgttgaaggcatacaatataatcatatataacatcgtgataaacatccttattcacaaactttgtaaacctctctgcttcttttgctaaattccccaaagtagaaacaatgctgggtcaaagcataaccttctttactgctctctgtagggaaatcctgtcagggggttccccaaagactgaactaacctgccctctaccttcatgttatttttcccacagtaatgctcaattgataaatctcactcctagttttaatgtttttatcaataataaggctgaatttttaaaattgtattggtcctttgtgtgtctttcaacaaattattatatcacttacactgcccatttttcttaaaaatattaagtagctctttatagcttattatctatactatatgttgtaagtacttttttccatcatgattgcttgatttctaatttgggatgcagtgtttctgattaattaaatgttagatttgactgcatgaaaagctattattttcttttattactgcttttccctgtgttttcatgttaaaaaatacctcgtgatactctcaatatcagaaaatgtgtcacctatatttcaaccacattactgtatggtttatttaaaaatcctttatccagaaatttattttggagtatgtgatgtgatatatacatatacaataaacatatactgtaaacatgtatttggctcgtatacatgaagtaggaaccagcatgtccagatttttatttgggctaaaatttgtataaatcagaaaggattcttttactgttttatggttcaatatggtagctagtagccacacttggttactaagtgcttgaaatgtggctgtattacaatgcacatggaggtatattgtaagtataaaatacacaggggatttcaaaacttaatttgaaaacaaagtatgtaaaatatctcaataatgtcttccatcgattacatgttgaaataataagatttgggatatattctttaaataacatatagtattacaattaatttcatctgtttcctcttccttcttttggtgtgggtactggaaaattttaaatcatgtatctggctcacatcggtggctcacactacatttcttccggacagtgctgatttagttcctgcattcaagttaggcctccttggctccttttcagtttagccccttgctactcaaagtgtgagccctagaccagccttagacagttcacccaggagcttattaaaaatgcagaatctcaggtcccactcctgaactattaaatcagaatctgtactttaaggagacacctccaagtgactcctttgcacaataaaatgagaaccactgcttccatcaataaacgtccaaaacttggccatctcactcctaccactaaccactctcatgatgaaaaaaggatgggaaacataaattcagtgacagggaagggaaggcagcgactactgaaagcctaaaacaaaacaagcccaatctaggctttctttgggtagagagaactccctagattactccaaaatcaggtaattcaacaaaacaaagacctttgcttattgggtttatgtttttaatcaagcaatataaatactatatgtattttataggtttctttggaggggaaatcttttagaatctatacaaccaatttgtgctatggcccctgacattttttccattcctgcaaataaactttgattttgagtaacatattcgttgaatctggcttactttgttcttccttgactgacttacagtacctctttcaacttttctctaaaataatatgtttttaaatcattatatataaggaaaactgaaaaagtattctttagtctcctacatagaaacacactattccaaaaattcttttttcttagaggctaaacagttatacagtagagatttgagtattatttctaaaattaccccctaactgggcatgatggctcatgcctgtaatcccaacacttcggaaggccaaggcaggaggaccacttgagcccaggagttcgagaccagcctgggcaacatagtgagaacctgtctcctaaaaaaaagttaataaaataaaaataaataaatgaaattactcctctcagtccccctgtatacttcctcactgtcagtcaccctccttaaggaggttagagtaacaagacatttgcccctaaaatcatcttgccaggtaaacctaatcaaatggtcatcctctgcctgccctacctaataccaaacactgaaatggcacaaggtatggtgaaaagtgcaaaggagacagggctgagtctggcccattttgagtgataataaagagcttggaaggctaaatgtgaatctctagtaggacaatggcaagcgatgcccaagagactgtagaggccaggccactaatttctggctttccattctgttaagtggatcttcttgtctaatcatgagccaacagttcgctattttcattactttaattttagggtagctttaatatctggttgtacaggcatactcttacaattctttttcaagattttcttggttattctcacctacattttttgttcttgcagaactttaggataatcttgccaagtttaatttcccatgggttttgactagatttgcgctaacatcggtaaacttatattgaatcattcaattcacgaacatgttacaactctccatttattcaggtcttcttttatgtacctccataaaatttaatagttctctttccaaaagtcctgcacatttcctagtcgctttattcctaagttgtctatatttctgttgttatagcagatgtaatcatttttaaatttttttccttttacttaattatgcagcaatacatgaatacaaagtcattacaaaacattacagaagagtaaaaccaaacactctggtcattaatcctacaaaccctcactcttcccaccaaaggggacatctataaagagttgggctcatgtccatcaagacaattttccatgccccttaactattgttgagtttgtggctttgttatgttttgcataaacaagattgtactatgtattttctttatgacttttcatacagaagtgttgtcttagaaaagtttccaggtgcatagatatggctatacctgtagttgcatattatgctattataagaatttgacaatacatttaatacatttccctactaatggacatttaagtcaccagaggcttttcacactgaaagcactacttcaccaaacatacatatacatagatttatatacatatttatgccagtatttttgtaggtgagatttataaagatgggagttctgggtcaacatatgagcattttaagaaattgaaagctactatcaaattgccctgaaagaaggatttaccacctgtgccaacattctgaaaaagtccattttcccataccgtttatattttacattttcactcttaatttttggcaatttgccaaaatgttatgaaatacttgttttttagttaatattacactgaagaactgaggaagatatttatatttgcattggctatatcaatattttctcctacagtctgtcttttcctagctcctctttgataagctatgaattttctccttaatcccatgaatctgctcaaggagctctattttattatgaatatggatttcttgtctgttatatatgcattccatactgtcattttctttttaactttgtgctgtcccttgtcaacagaattttttcattttatatagttaaatctgagctttacaaaatatgtgctttattaacaaaatgttaagtaacaaaatccagaggtgtatctagtaactattataatttcaaagtagttatgaccacaaacaatatttcaagatatctgcaacaaccataatgctctacgaaaatagctagtatttctactgttgacaaaatccaggtcctgctaatactactgaggtttgccacattgtaattaaaggaaacagtaaattttagatgtggttaattgataataaagatgtggttgttttcccattcaattttgcaaactccttggtccaaagtcatctatttattgaattctttcctaaccaccttctggcaaagttaactattcttcctctgtgatcccacatctgtctacacttgtactcacagaatgctccgtgccaagtgcttcactttccttatctcatttccctcaaaagacagctcctggaggaaaggactagagtgagacgaagctgatggagccagtgccctgccttagaaccctggcatacacggcctagcatgagttataaagaggctgatgtactaaaaaagtgtacgattgatggttagcaaacaaatgaaactgtacttgcaatgcacaattggaatttatgttcaaaatctgtctatagtcccactgtgctggtggctcacattttattgtggtgctgatcttctattcttctatcagcgattctcaaccttgttttgaaattattgtccctcaaaagagccttttttgggcattttttcctaattgcccgcatgaaattttaatattacagactataatatacatgtatagctattcatgtaccatgaccctttggagggccaaaaaccattgtcataatttttttttatttccccaaaccaagttttgcccctgctaacaattcatagaccaaaatgaaattctaagaaagatgagtatatctgtattctattttaatgagacatcaaaatcataagccattgtgtttcttacacagaaaaaatgttatgttgtacccttcttatccctacaggctaagaagttgtaagaccaaagaacacagtattaaagaagatataaagagaggcatttaaaaaaatcacaattgaaccctacactccttgccacataactcagactctttcagtttcaccaaataatgtctttcacatgtttattactccatatgtcattagagaaaatacaggatgcctggagttataatgtgcaaaaggcatacacatatatctcaccagtaagttgagagttactatgacgtctctttgaactttgccagcattttagaaaaatgactcaaacttttgctggcatgggcaaaaataaagcagagtcacagcactgacagtcctttgatattagattgttgttaaaagaaaggatgcaaagtctttgctggaatcatgtactaaaatagaacggaaagcctcattgacttaaaagctaaatggaaattggtttggtcatattttaaaactgtagccaaaatatcttcaatatgataatacagtatgttcaaaagatttctgcatcaactgtagcaacctgttgagtctttgagagcaaaaaagataacattctgaatcagcattttgggaagcaaagggattacacagttcatgaattaattaaacacagtaaataatgttctttttccccaaccttcttaaatcaaatacatgtaaagtctattttttaaaagcacacagtatgcaaaatatttgtcataaaataaaagtaaactgaaaattggtaaagctctttgtatttgcagtgatgattgctggcaaataggataacataaataaaagtttttcagaaaagttttttcctattttcattgtgaaaactcctcttgtaccagaacattctttccctgaattaaaaaaaaaaactataacacaacatttatcagttagcaaaactcaatttaatatagtttaaaactattaaatttgtactgaatgagctacgtcaccatttattaggctttttttttaacttgaaagtctcagtgtttataaagcacttcttgttttataaaaacagctatttattaataaacataaatgtacacatatgaccaataagctcttgtggttgaaaggtttgaggagggaaaaagacataaaccggggccacagtcgattgcatccaggtaatattctggtgagtgatatcactgggaagaactgagctttgttttgcctctatcttcaataaccattgggtaagtcaatgggtaaattttgtttaccactaaaccaaagtctccttcataacctcatcaaatataccatactcatcccctactccaaacatcattatatcatcgtcatctgggtgacctttcagccttgttaccgctggtgacaaaatttagtgggcaggtacacagaattcaacttgctcccagtcagaccaccacttatccttcctaactcatggtgccccattttactgcctaaatgagtcatcccaaggaggctacaatcttctgatcatctgtctcccctacgtgactttcagggcagaccttactatcattcctccaccttgttgacctcaattcccataaaaatgtagagtctcaatccctagactctcttaccctacatggctctgtatatcctgtaactgactcaaacatgcccttcctgagtcccccaaaccccttgactgtaccttgaataatccaggtctatgacctcaggaaaatcccctatgttctcaccctcttctctgaatattctcttcacttttttgctgtcactgaaaagtggacacccccccccccccacacacacacacacacacaccaggacattgcttacgttgacaccttcttgtgtagcagctgttatttttcccccacatccctactgccagtgggctggaagagaggtgtatatcctctttgctgcttccaagctatttctctttcctccttcttggaatccataatccctttaaggcacatgtcatcagagacacaagctacctctccttataattatctactgtattcctgaggattccccacttattgttagaagattttgctatggttccctgtctttctcttggtcactagttttcttatctgcatagataactcatccagaaccctggtgccaaggtccatgccctcctcatgcaaaaaactcctgtctcccagtcctcctcagacacacacccctctgctcatgccctgtcatcatgaatgccaataactgcaccatctacaaacaccccaaactcaactttccctttctttgaccacctcctcccctctgtccagcctactcactccagtatccactccaaccacctccaacaaccaccaccgcctcatgccctcacttccttcttatattatttaaattccatggtccactgttaaagtcacccccatgcccaaacccttacttccatcgctcctaagttagttaaacccaactcttcacctattagatatttctctagaccaatacggctaaacaaaaaaacagttacactggctcatctcccttaaaacttactaacacaacctcaagtgacaatcgaagctacctggaaaataaaataaattaccactcaaggctgtggtaaaataaatttctctcctgagtggacattttcattctcacatacacattgtggaatgctctctcttcaaaaggctctattccctctaccacctgcactctgagatgactgtcaatcctgtttctcttatttccctgagaacacaaaaggtaaccagaagagaacttccatattttcccacccacaaactaccatccccactgcaaacatacccacagactacacctttcccatagaaatggattaattgtaccctctccactagggctctgggccccatcccatctcacctactccaggactctgcacctgcaattattacatatcataggcatcatcaattgttccctttctcaggatcattctttcagtatacaacatgctgttagttctcaaaaaatctccactgagaccacacagttctccagctacaccaccctccccattctgctatccaaatgaatcatggaaagtgaggagtgtcttcttctctttatattccactccattaaaactgcttgtcaagatcaccaatgagctgctcactgcttgtggcccattcttagccctcatttgtatccagctttcatttgacagaattgatcacttgctgattcttgaaaacatttcattctctttgcttccaggatccagtgttctcctgattcctctcctccctgcccagctgctttttctcagcctccttgcttcctccttctgttttgggatggacttctgcatggcccagcccatgggcctctttcctatttacattcaacgcactggtggtggggcccaaactaatggttttgataccatctgctagctgatgaccctcaaattcatatctccaactcaaacctcttctgaatttcagaattgtatatccaattctgatatatattcagatgtatatatccaacaatgtatgcctagctgttatctcacttggatattttttaggtatctcaaaattaacatacccccaaatcaactccaaacttcttcccctaaacctcttcccccaggtgcctgcattttcattcaccctattactcaggccaaaattcacacagacagtctgtctggcattgccctcatccagttcatcagccaatcttgtcttctccacaatgagaacatatcctgaatctgatttcttctccccacttccacctccacttctaccaccctgggctgagccagcaccaccttgcacctgcattactgcaacagcctcttcacggctctccctgcttggaatcatgctgtatcacccccagcaccaccctcacaacaccatcccaccacacagctccaggtgatcttctcaaaggataaatcagatcatgtcactttgctggtttcaaaagccttcactcactttcctccacactcaggataagatgcaaagttgttgctgtggcctacaaggcaggcctcatattggctggcccctgaccatctctccacatctcttccacgcgccccgttcattcctcatttagctccagccacagtgccctcctggagttctgcaaacccagccagcaggctaccacctcagagtgtttgcgctttacttgctgtcttttctacctagacgactggtcccacacagttgggcatggcagctggcacctcaccacactcaggtcttggaccaatggttacctctttagacaggccttcctgaccaccttatctgaaagagcaatggctgtcactccgtctcctcaccctgctttaattctactcatacatttgtcactatgcaccatgagttgttacttcttcattatctttctctcccactagactggctcccttaaggcagagatattggcccacagtgttatctttagggcttagaatcgagtctggaacctagtaaagcctccataaataaatatttcctgaatgaattaattcataaatcaatcttgtcttcatgctctgagaaaactaaccttattgaacaggaaatcaatttcttcagggcatttaacaaaggaggcaatttcccaggtcacttatgcaagtaaccgaaggaaactgttttgttttgttcttaacgtataattcgttcttcttgctcctccaagcacctcctagaaaagcctcaaatagttggttgttctaagtgcacctccccttacaacgaaagcataggccaggccgggcatggtggttcacacttgatcccagtgctttgggaggccaaggtgaggggatcacttgagcccaggagttcaagactagcgtgggcaacatagtgtgaccctgtctctacaaaaaatagaaaataattagctggctgtggtgttgtgtacctgtggtcccagatactagggaggctgaagtgggaggattacttgagcctaggagttctaggctgcagtgagctgtgatcaggccactgagctccagcctgagtgatagagcaagacactgtcaaaaaaaaaaaaaaaaacgaaagaaagaaagtataggccacctgcccttctggtcgagccaccaacatccctcgagtagaacaaaaactgatgatagaatcctcattataagaatgcatttgtctacccctgaaaaatgacttcaaaatctctcagggtacaatcagaaaaagagtttcattactgaatttatagaagatgagaatattccttggagaactttttaaaataatttcatctacattttcctgtcagaaagaactcttcaccttctccttttccaataatgagtctaactctcctatgttagatatgtggcgtcagctcttaataaatcaataagatttctcaggaaatagataagacttaaaagtctaatccataatagtttacattagaaatctgaaggttaaagaggttgcctttaaggcttttatcatggctctgaaatggaatttcatgaatcaatacatccttgagagtcaaatgtagagcaccatatttcgatttgtaccaaaagttaaatatacactaaagttatcacagacccgctgtcaagagaaagtcttgctttacatagagtgaagaaggtaaagcctagagtctgtttctggaattttcactgacagacagattatagtcttgaaagaattaactgtaaaaataatgaggcagttctcagttacacagtatactatttaatcctcagaacaacttcaggaggtgggtcctattatcatctgcattttacagatgaggaaactgagtcagagagtgtttatgacctgcctgagatcatatacagagagtaagggattgagctggaacctgagtgcaggcgatctggctggagtccatgctcagcactcctccaaatgacattacatgatgggacctacaatgctgcctctcctgacatttggaaattatcagatttcaagaataaagcaagttactggctagaaaaaaaaaggaggcaaataaattagttagagttgctcttcgacctattcaagtacaatttactatcaactatgcaaacttagagtgttagcttgttttctcatcaaattacttttgactgaggtagtggacacacttcacctgtgaggaaggtgtatagaactacacacaggcacactcatacacacgcacacacacacacacacataataaatgcaagtaaaactagggaaatctgggccatgcacagtggcttatgcctgtaatcccagcattttgggaggccgaggcgggcagattacttaaggtcaggagttcgagaccagcctgaacaacacggcgaaaccccatctctactaaaaatacaaaaactagccggacatggtggtgcactcctgtaatcccagctacttgggaggctgaggcaggagaattgcttgaacctgggaggcaggggatgcagtgagctgagattgtgccactgtgctccagcctgggcaacagaggaaaactgtctaaaaaataaataaatgaataaaaacttaaaaactagggaaatctaaataagtggtttatatcaatgtctgtatcctggttgtaatattataccatagttttgcctctatgttgctgctgaggtaagccaaataaatagtatgtggatgtctctgtattcattattcctcccaactatatgcacatctacaattatctcaatacaaatttcaattaaaaattattaaaaatatatatctttagggtttttgatattttgaaaaatcactttcaaatggatttggattctccatactgaatttcaaactattttttgctcttaacaagatggagcttgaggaaaaatcacctggaaactttataccatgaggtattctcaagagggctttaataacaatattcaactgcagtcctgatgtggtgctgtctttactgagaagttaaaactattatatgatggtcagtgatgtggaaggcacactacctttttagataatttttatgtaactgaaatagatgaataagaaaattgtaaacagggaaggataccttttccaagcaacctgaatgtggcagacaccttttgatcataaaacatatcccttaaacacactccctcaatcctacgtttctctccatgcagaagacaaaattcttcaaagagctgcctaattccttgttgacttcctttcctcacctcctattccctcttcaaactacctcagtcctgtttcaaccctcacaactcatcccattaaattcaactgaaaattactgcactcagttccttgccttgtcctcagcctctgaggctgctttccctccctgcttccgcattccctcttccatggctcttctggtttcctccacatctcaggtgctcctttgcactctgccctatgagcttgccctcccattcctggctatgacatgtgggcgctcctctctccctaggtaatctgatgcaggcctatgacttcattttatatctatgaatgtatcttttgctcactattttatgtctcaagaccagaactctatatctcagatgcctcaagtgtcctcaatatgaaagctggatgtatgatcttttcccctttacagaagcaagtaacccaagagttcttttacaccactctcaatatccaaccccttagcaacccacttacccgcttatccttgtaaggatttctcaaatctgtgcactcctctccatcactcctgccaccacccatatcccagctaccactatttgtcatctcaactaaagcaagagcctgctaacatatctccctggcttcactcatgcccctgacctccatccaagtgagcttcttgtgacccccatgcttaaaacactttgatgactttttactataaagacaaaatccttaacacggccccctgctctctactccagccatatgagcacttctttgtggttttcacagaagctgtctctgtttcctctggctgagccaatctttccagtttgtttgccgaatgaatttctactcacccttcatacttcagctccatgaacaatatttcctcaggcaggacatgcctgtcctctccatcccccaatataggctcacacattgccatatgccattctttgtagcacttactgatatttaaatgcaacttccatctgtgtgattgtatggttaatgcgtgcctcctcactggactgtaaactcctcagggaagaaacatgtttacatgtactcatcactgtactcatgcctgacacactcccacaaacacacctatattgaggaaatagcaccaaaaataaaaggtagattttagaaatggtagaaattgtgcctctgcctttctgccccttcgcaccctggctggagaagaagatgaggttttataattatatacatgataaaatttgtcacttaaatatccccaaaattgaaaaaaaaaatgctgtcattgatacaactgttatttaaatattaccattcatgttttaattgaattatgatattttcaattaatcttgatttttccccatatctccattccacaggtaataaagaagtaaaaaaaatgagtaaataagttttttaattaatcttttttttttttagacagtgttcctgtcgctcaggctggagtgcaatggcacaatcatggctcactgcaatctccacttcccaggctcaagggaccctcccacctcagcctccctagtagctgggactacaggtgcgtgccaccacacttggctaatttttgtaatttttttgtagagatgaggtttcattatgttgcctaggctggtctcgaactcctgggctcgagcaatactcttgcctcggcctcccaaagtgctgggattacaggcatgagccaccacgcccagccaatctttattttctctcaaaattttaattcacaagtaaaagctgaaaatgtgtataaataaggagttttatattgttaaaataataatgcaattttcagatgtttaacttattagacaaatggcattgctaaaaatttcccttagggcatcatttgtttgccttcacgtttgtgataatcaacgtcataattttatcagtgtcttcatagcttttgtaactacacaaaaaatcttaacgtgagcatcacatcctttcctccttccactctcacctttccacaaacaagagaaagttaccagcttagccttaccctgtcccttgtggctttgagtacagaaaatgggaaattccatgcaagtggatcttcaagaggaaaacagttaaagaactatactcctcatgggctgaacatgcagaaggagccgacccctgggagaaggttaccctggggaaacagcacagaggttgctgagaatccaaagagaaaggcgacagtgggaaagggaggataacatagatgaaggaaaacacttcttggctaggagggctgcagtctcccaaagttataagtgccaaagaatagaaaggggacgagggactttaatgagatttgacttgaacggtacttgaatgctgttaagtactggagggagtttcaggtggactggaattcttgcttggactgtgcatcttccaaaagacatgctcacatcacactttctttaccaatcgctaaaaataagaatacttattctgcacttactcagtgctggatactacagagaatgttcctggttcaagcaactatcctagacttactagtaagaattttttggccagaaggtgagaaatgcatccatcaaaaatttaggagccagccgggcagggtggttcatgcctgtaatcccagcactttgggaggccaagatgggtggattacctgaggtcaggagttcgagaccagcctaaccaacatggtgaaaccccatctctactaaaaatacaaaaattagccaggcatagtggcacatgcctgtaatcccagctacttgggaggctgaggcagtagaatcacttgaacgcggaaggcagaggttacagtgagccattgcactccagcctgggcaacaagagtgaaactcccatctcagaaaaaaaaagaaagaaaaaaaaatttaggcggcttccacctcagtgaaatgtctaggggtccagtggtgtggggcacgttgagatatcccttctaaggtgaaagataatttgttgcatctggtccctcctacagccaggaaagaggtatatgcctggtgatcctctttggattttggaggcaacatatttcccatttgagtgtgctactccagtccattcactgagtgacccaaaagctgctagttttcagtgggtcctgaacagaataaggttctgtaacaagtccaggatgctatgctggctgctctgattcttgggccaaaggatctggcagatacaatggcttgaagtgccagaggcagacagggatactgtctggagcctttggcaggcccagctaggtgaatcacagcacaagcccttaggattttagagcaaagccctgccattctctgcagacaactactctcccttttgagaaatagcctttggcttgctactgggccttaatagaaattggacacttactacgctcatcatgaacaggatgttaatgaccttccaagatataaagttgggtgtgcataacagtaatccactatcaaatggaagtgttattaatatatataggctcaaagtggcactgaaggtacaagtaagttacatgaggaagtggcccaaatccccatggacctgactcctgctatgttatctcctctccctctgtccacaactacaaccttatgggagaaaacttgggcctgttcacagatgcttccacatgacatgcaggcaccatctgaaagtggacggctgcagcactatagcccatttcaggaacacctatgaaggacagcagcgaagggaaatcctcccagagggcagaacttcaaatactgcttctggttgtttattttgcttggaaggagaaatggccaaatgtacagttctatactgataaatgggatgaagccagtgacttggtcgtatgttgagaaacttggaacatgattggaaaattggtgaaaaggtcaggggaagagatatgtggacagacttctctaaatgggcaaaaatacttgaagataattgtgtcccacgtgcatgctcatcaaagggtggtttcagcagagaaagagtttaatatcaagaggacaggatgacttgttctgttgataccagtcaaccactttccagacactcctgtcattgcccaaagggctgatgtacaaagtggccacacagtcatctagtgcttgtgacacaccacaacataaacacaaaatccataatgccaattatcatcatgggtttgtgcccatgttgatatatatagctcatcatacagcttgatactatagttccacacaatttctacacagaatggaaagaatatatttgtttatttacatctttaatataaggtagcattaagcctctaacaaatattcatttgtcaatctaatactctcctaacatgtattaacttgtcaatttagcaccctactaaagaagctttaaaaattaaaggttgaggctgtaatcccagcaatttgggaggcccaggcgggtggatcgcctggggtcaggagttcaagaccagcctggccaacatggtgaaacctcgtctctaataaaaatacaaaaattagccaggtgtggtggcacgtgcctgtagtcccagctactaaggaggctgaggcatgagaatctcttgaacccaggaggcagaggttgcagtgagccaagactgtgctgctgcactccagcctgggcaacaaggcaagactccatcgcaaaaacaaacaaacaaacaaaaaaacaaaaaaaaactgttaaaggttgagttttatttcatatatctcaaatgtgaaaaatctaaatccatccaaataaccctaaattttttttctgaaactaagaaggatctacataagtgttccaggaacaaaatgttgtgagaaaaacaagcagtatttgttacttattacaaattgagtatgatagaaccaggcagctggaagtccttttatttgacaatcacaaaagcatcatcttcaggataaaggctttgcaaacatctcaaaggacacagtaagcacttccacttcgaggactatgaaatgctagatattctaagaatccctcaggcaataagttaaacagaaactggactgactacaacaagcttattgccttgctaagctcacagcgaggtgtaagctgaagtccaggtcttgggaaagaggagcattaagaataaagagatgcagctaaactttgagaccatcccgtgcatgcaggcaaaaatggagagccaaacctgagaggcccacatccagctggagctcctgaaggaagcactgtctttcctatttaataagggccttacgggactgcagttagacattttaggggactgcatagtaatgcgacactgctggagacagaaaggggcagacacaggggccctattgcatcctagatgtgaaatctatttaagggggtgggggtggtgggcaaagatagagagagctcaagagggttatatttaggaaatcataaagatttttttcaccgtttctagcaagacaaggattccagacatcttcagagtatccagcagttagctgacagcctccagctgccatgccttcaggatctgtggcagcatcctatccccaagcctctcctcgtcaatgcctaaacatgttggggctgggctttcctgctcaatggttgactcatctgctgggcagtctttgctgtagaggaccccctggtctaaccaagattttttcaaagctctattcagtctgagtctcttcctgcccaacctccttccttccttctttccattcacaagtgtcagactggcatcacagtctgagtcctacccacctattccttctcccttgtccctgtgtccttcacaaacttccctcccaatgaatctcttgcctatctaattccatcatggaggctgaacctcagagcatctctgaactgacataataatcaatagtgctattttgtatttgttttattttataagaaggaaatactgttactgtgataaaagcacattaaatttcatgaatgctatgcaattacttattttttaaagcattaatgtgacaaatactaatatagctcttagctttcatacactaaaactagtaaattatttaatacatgcaattgatgaaaatgaaatattaaatagaaactataactacttatgtacaatggtccaatcattttatatattcccattgttcaaatagcatttatacacacatgcgcgcgcacacacacacacacacacaccccttgccaggatatcgatgtactcagcataacatgctcaggcctttcaaaagaaattgttttaatcagagaaataagacaacaatctgcctattcttttgttttgagatggtgtatctctctatcacccaggctgaagttcagtggcatgaacatagctcactgcagcctcatactcctgagctcaaatgatccccctgcctcagcctcccaagtagctgaaaccacaggtgtacgccatcatgctcagttaatttttctattttttatagagatggggtctcaccatgttgcccaggctaacaatctacctattaaccccaaattaaatattattctacatatggacttaaaaattattacatttgtaatttggattatgttagttatcactaaacaaatattaattttgtttcgatagcaccctgggaactacaaccaggcaaaactgcaaagcaaatgaaggtaaagctgcctatgacccccctcccattcatttttagtctttccaagttcttctccatcccagtactacttcaaggctataaacgaggctccccagagtccacaaaatgttccctccaagaggacatcctctaaagtattaacaagtgataccagctcatagtacagttgcttttcagaaagaaaataatctgagctgcagtgaaaactgtcccacagagctaaccctgtgacctggatctgaggggattaaaggcaaagctcactgatttgaaaagtgaaatacagctgacttcagctttcctgctgaaccacagctttctaactattccttgtcaaaatgtgtgtcactacaggctttgtcatcaatgatgtcaatgtgaggcagcagctaaagaactgtgtgaagacaaaaatgttaaataagaaaaatgcacatataaactttcaattacctgtaaatatgtcagaagtccagtgtagtaaacactccttcacaagtctttaaaatccaaacctctgttaaattcaccaggtctaggcctgctttctggtactggtgttcagttcataacatctgatttccttctttgaatttataattcatttaccaaccatttaggctcagtaacaaacctactttagaaagagccaggccagctcaagagaacgactggatctgggccattttatgtaaacaaagaatcatctgacttcatgaattgtcaagggaaatatcataggaaggaagagatgggaatggaaaaattaaatacttctgtaaattgcttggatcctgtctttaacatacattttgtgatatgagttcccaccatgtctgcaagtgattttgtttattaaatgcccttcacacacattattttatctaattatgaaaacaattctatgttgtaggtttgcttggctccattttgcacaaaaggaaatcacttctggtggaattttagtgatttagatgaaacttacacttgccatgtggcagactggggagtagactccaaataagaactgtactacgcagcttctttgcaaaatgccatgcagcaattttctttcgctcaacacaatatttcaaaaaggtattcatagctgctcaataaagtgtttcttggccacaaaagattaccatgctataggatttacaagattaaaagtaataatttggggctgggtgcagtggctcacgaatgtaatcttagaactttgggaggcagaggcaggtggatcacttgaggccaggagttcgagcccagcctggccaacatggtgaaaccccgtctctattaaaaatacaaaaattagctgagcatggtggcacatgcctgtaatcccagctactcaggaggctgaggtaagagaattgcttgaacctggaaggcagagcttgcaatgagctgagatcatgccacttcactccagcctgggcaacagagcaagactccatttaaaaaaaaaaaaagtaataatttgttctccaggctgcgcttctatctaggcttctgtatatatagtatataggttttctgttttgccttttgttgtaaagttgtcaggagtctgtcttcgctgctatagtatctctccaccaggaaactttcttttaatttgctatctctcaggggctgtgagattggaaaccagactaccatgttaaaatcattcatatagcaagcatttattgagcctcttttatttatcatcaacagtgcagtagctgctgatgatctgagctcctttagactcagtccctgtcctccaggaatctgcagtccaacggagaagataagcacacagagagaggaacccaacagtggagctccagatgctaatgcagatatgacacgctgctgtgagtgcacaggagatgcggaaactagctccgtctctgagaacggttctcggaagtgagatgtgagctggattttgaagaatatatacaattttattaagcaaaacagaggaagtgagggaattacaggcacaaaagaacagagcatgagaaaagtcatggtgtactggaaggacttgatggatttagaaaaggtagacaacttaaaataacaagtcaaggaagacgttctataaaataaactttgagtcagagctataggtaaagggcatgaggttagtagatgaacttgttgacatctattttgggtttgcagaggacttttttcttacattctggttagatgtgtttgatattataatatatttgggctataagtaggtaaactgttattgccatatgggacttttttgcgttgtgattttttccactaatcaacctcagtttactcataagtacccatgtatagcttacctgtaacatgtacatactaaaatataactgcaacccactagagtatgagttccatgaaggcatgaccatctgttttcttcattgttgattccccagcccctagagcacttaaatgtttgttgactgaataaatgcacaagttcatttatgttgtgctttacataagtttacctacttatagtctaattatatagtaatttcaaacacatctaaccaaaaagtaagaaaacaggcctccgtaaacccaaaatagatgtcaacaagttcatctactaacctcatgccctttagctctagttctgactcaaagtttattttataaaacatcttcctcaactgctaactttaaattgtctaacttttctaaatccatcaagtcgtgcaaatcattttcatgtctattaccttcttttatcctattaacatgacacaaataaaagcaagcaccattttaactaaatgagaaagtactcacccatgcctggttcctctagctcccatcactatggccttaatgcttccgtggcaacatttaagaatggcgcacacatccctgcctttagagctactattggctcatccccaaaacagccatgcaaatttttcttcacaagaaaagcttctacaaatccaacaaccagcagcagtagtgttgacgattttgttttttagagtatctatgccatctgttacatctggcttataacagggtgagctgaattgacaagtgatacccaattacagtaattattctagggtccacagaatcacctggagggcttgttaaagcacaaattgcttctctcccccgcctctttctactgccagtttctgcttcagtacacctggggggagcacgagaatttgcatttttaacgagttctctggtgttgttgatgctgctggtccagggaccacaccttgagaaccactgatctggataatcaggacaatccattcactctactattgtaattacatcagtatgccctctgcctttttgtttaactttttttcctatttttaatccacatcaatcttcagtcatatacagaaataaatgttcagatatagaaataaatgttaattcggatacattattttatgaaaactgaagtttcattcaccttcttgccaattaaaatgagttaaaagaagaaaaaagtacacaagaggggaaggtaactgcagagaattagtataacattatttttaaatgaaatacttcaatttagaacaagtttctatcacccaaagagaaacaatattttgctaaaattctaaataaaattctataactgtattaatagaaaatcagacccatatttccaaatgaatggaattttcattatggaatcaagttacttggttcataaacttagtatgtagaagctctatgcttcctaaggacaaactggaaaacagctgttacggtttttcttctccaagccttaatttcacagagaagcgctaatattctcttgttcattatatcatataagcacctcacagtgtttcccattatgagatttatcttgtttgctttgaagttaaaaagggaatgattgtctggccaagtcaggactcatgaaattctaaaagtcgatgagctcaattttgaaataaaatgccgtctcttgcacacaccatattaaatctagaaatctgtatttacatggctgttaaatgatattccatgttacaatccaaatatctacatatactatacaaatatgtgcagatatatgctgaaaactctaaagaaaataaaacaaatggaattctctgttttcaagtgttgataattagaatgttcactgattctaaagtttattagactggtggtagtatcagttcaaatactgtcctctaaggttgcagtttctcaggtgcacacacaaatattccacagatgcatacacagcagagttaatccccaaaaaacaatgaaaacatcattacaatactctgatgtacccaatcttctgatctaaaaaataccaaatggagatttcacaacagaaaatactacagtgataactgctttcatcaactgaccccaaaatattctattacatttccaagaagataatgtctttgcagttacacaatggaggccagaattttaaagaactatgaagaattcctactccccatgtgtggaaataagccaaatcagaaagtagcagctcccatagaacatttcaacattagatttgtcaggggagttatgcttcctctgaagcatattctcacgacaaaatggaatagccctgaaggtagagtgtatttgagaatctctcgtttaaaaaccctgagagggaaggttaggattgaagcatttgcccaagtgataaaactcctgccttcaaagctctcattatagaatttcttcaaaggaattttacgtttcattaaaaaaaaagaaacaaaagagactttaaaaaaatcatcaaaaaatccaaaaatcaaagtttttgctcttctcttctcaatgaaagggaaagcaaaggcaaagagccccgaccaccgtccccacaaatgatgtgccagtcctccctgtctgatatcagacccttcccttcccttgccctgctctgccttgcccttcccaggaatgaccctgcaggctacctctctcaggcacccctgcgaagtggcttctagttagatttacataatgggatgtggcaggagactgagggccaaaggaaggtcagctccaagatgtggcagtccttttctctgtctccagcagtatctacacattctctctctctctctctctctctctctctctctctctctctctctctctatgtctatctccctctctttctctcgctcatggtttccaacttacaaaacccaatccagatgtaaaaatagaatattcaagacctaaatgtacccacttaacccaacaagtactaatctaatacttaggtagggtcttcccaacattaaatctgccaggccaccaattctacacctgatggaccagcagctgattggagcttttctctgcattgtaaccaatattattagcatgaatagctcagcaataccaaggttgtacacagatcactggtacatttctactgttacaaatgaattaataccctatctatgaacctgagcttcagtgcctcatcttaagctggcattaattatactggttcaactgacaaaagtctccaatgatttaattagagatggatacagaagggaaaaagcaaagcaaaacacaaatgtatactgctatgtaaatgctaagtgttattttgatgagctcaagttccaaccccttcttagacacactttgtgctgaatgattttgtcaatgctgatacaaacattttccatgtgaagtggaacatcttcctaagggagatttgtttcctgagacatttgtaaacctccttaatatcacaaattaggcatcctgactccaccatgtatgatctgtttgacctcaggcacattatttcactgctattaaagcttcagtttccacatctataaaatggtttagtaacaggactgacctcatggggttgtagtgaagaactttgaactttagcaatgttattacttagtatgggtcagggactaggactggaaagggctctgcttgagctctctttggggcatcttaaggctggtggaaatagttttctgaaaatgtggtggttgtcagaaacttgtgcttctgactcataaatgggttagatattccatataaagttaaatggtattgcctagcatatagtaagaagtcaataaatcttagctatgttattattgccagctacaacttcatgccagtaactggaaaggaatataataagaaaaagttgctgatctatatattatttggttaaaacaataataattaaaaaactagcagggtaaaatatctacagaacatgtaaaaaccctattttcagcctccactttcaactgaaagacataattgaatcactgtatgccattgttcccaaaatgggcttccagaccaagaaaagctcaaatgtgtttaaaaggagaagcaatccagtgagcagaggaataacatatgaatcacaagcttctgacaaacatcaggtcctcagaaaactacttccaccagccttaggaagccccaaagaggactcaggcacagccctttccaatcctaggccctgacccatactaagcaatagtatcaccaaaattcaaatgcaattttaggcccgtcatctaacaatgtagagtttttcattgaaaacacgtttatccttttcttctatgaaatatcatttctgttttccttcagtgtccatttgttatatatccaatatatagccatctagggcctagctaaataaagctgatggatatagctttttaaaaaaataataaaacatagttctgaaaccataaaaacaaataactctactttgtatctcaggacatatcagtatttagtatatctcagtgggaaatttatatttatctaccctttaaaagctaacatttgtttttctatcctgctaagtctattttctgaaagagagtaggaaagaaagagaaaatatataaaatggaaaagattgtgacatagtataatgacagatcataacttagaatagaaggtatataggttattaaatttaagaaatagaacatatttttataaactaaaatgaaatacactctaaatattataggtttaaatccatgtattgtaagaagggataaagatgttgccttttttttcctttgtgctcttaagattattaccatctggctgcagcacatagatccttaagtaactgtatttataatttagagaaacatagagcaagaacctggacattttcagtggattgtccaagggataggtgaggaggggacatttgcaagaggaagactttcccatacttattcactttccaaggcttcccagaaagttgtccctgaggtcaggagctgacattcaaggccctgcacttgatgttaaacttatcaaaagcacaagagggaggtcatgcttttaaaattcagaggaaggaaagggacagaaaccacctggcgggaacacacccacctcacccgccccactcccaacaagatgagatgccttccttcccttctcttcagtacaacaaatatcttttattatccagaatttttatccccttaacatagagtatctttggttgctctttgtctcaagttacaaatgatacatccaatttttgccttagatttttggcttcataaatattatctgactccttcaatgtcttttcttatttcaaaatatgggaaaattggacatctcaactcagtagtctttacttaacactttacagtcaagcaaaggactacgaacaatcacactttatgtttgcatattgttttacaacatacgaaagctttcatgtatattctcttttgttgctcatcacaaacatgtaaggtaggtaagaaagatggcgtcattatttatgttctctgagagaaaactgagggtctgaaaaatagttgtgaatgttgactctatgcacatggacagacagagagacagaagagttggaaatggttaaatttcccatacaaggtcttacagctattaagtgatagaatttaaattccttccagaatgtctgactctggattttgtatatacaaattgacaactgttccaatccaaaatgttgcttagggagatttagcaactttaatacatataaccagaaagcattaaacactgggatagaggggaaaacattatctaatagatttaaaatttatactatccatagctaaagacataaatgtataaacccaatatgtagtaaaaagactatgaacgagagatcctaaaacaagatgataaaatgaaataattgtatacagttctctacaactaatgtaagattgcacaactaatatgtatatgctcaatgtttaaagtaactagctagttaattgggaaaatgacatgaaatgagaaaaagccaaaacctcaaagatgaaccatgaaaaagtaagactcttccccataccaaatcctcaaccccattcctcaatttcctctgtatccttctaaacattttgtttacatttataagtaggtgtatacatatgtacatacttatgtatatacataagtatatacatacttatgtgtatatatataagtgtgtgtatatatatatacacacacacacacacaggaatttggagggttttgtttttgttctacaccaatggcagcatactatacaactgcttttttcattcagaatatatcagcacattttctaaatcaatatacataaatctacttctttaaaaaattatataggcttttttcccccaatataaggccttaagatccccaactattaatttccctatcatagcatttttccgggacataaattgcatgactagagaatgaacactttattgtcatgaaactaattcataccaagcctgacatatttttaacaaaactaagtaggagcatgtaataaaaactgtacgctaacaatttcaaaactctttaacgaagcctcttttcattgatttcttgaaggagaatcagaatcttttggagaacagtactgagctattaaaatgctaatagaaatgtatcccttaagtcttagtacaaatagtacaggcagaggtcattaggtaaactaaaaatcctgtaagctattctctcttttctctctctctctctctctctctctctctctctctgtctctctctccctccttctgtctctctccccaaactaaagttgatacaatacaacaaatttttaaaagtcagggctctatatacatcagcatagagacttcatatagattccatgtgatttggattttatgcttaactcagaacaagcttatttacttctttactaaaaaacatgtgtaaaaataaaaaccatcaatagtgactttgcagagaatagcaaatattcaaagagatagaatatgatatttagttccctattacccaagtaacatcaaaatacaagtctatccgtccaaagtacgagttggaaaatgattgaacgtcagaattaacaccttaatgcccatgtattgttggaaaacggcaatgtcaccatgtaaaatgtgtgagcaggcaaaattagactggtcaccaaaaaagcaccctccagcatgttagatagaggggacactgaattcctatagaattcaataaacagccatactgaaacatatcaccaaaaatgctttgcgacttaagtagtatttgcaggaaaaaaacttttccctcattgctttttaacttctctgagagaaatgaatgtggagtttgattcctacttttgattacacaagattcctgattaaagaataatttgaggaaaattcacagcaagagatagctccaattacaaccagagatcattctaactaacctggtatacattttttaaatagaaaaaaatcaaaatgtgtgcaaggatataaagtccatttatatgtttatggaatatattaatatagaacagaaaactaagaaactaagtgattaaatcctctcagaggatgactagaaaaattggacaaaatatttaaagaaacaacccattaaaggcacacagatctctcacgtatagtaaagatttactgggaaaggagtctaggtaaatacaaatttgaagcaacttctttccatgggaacttacatgggttccagcagggagaactagagactgaggctgaacaggatttgcaatatcctcttggtgcccaggccacagaggttggtcttcagggcctacaaagggttggggaaagccctgctggactccctcacttttggctgtgatccctaaaggctgttcctgaggagtaaagctgaaccacaacttccgcccttgcaactcagctttgaattattgcaatatttgagactggaaaagagatctttctacctcctagtctccccaggtttcctaaagtgttagcacccccaggcaactggcagaaggtttaaatactgttaaaaagagatcatcatctgcattagttatcagttgctgcatacaacattattccaaatttagtggcttaaaacaagatatatttatcatctcacagttttgagtcaggaatctacgagtagcttagcttggtggttttgcttcaggacttccaacaggctgcaatcaaggtgccagatcgagccgcaatcatgtaagccttgactgggtctgaaggagccacctccaagttgactcatctgactgttggcaggagcttcagttcctcactgtgtgggttcaccatagggctgctctcaatgtgcttctcccagagggatccaagagcacaagagggagtccaatatggaagccacaatctcaaaagtgacatactggccaagtgcagtggctcacgtctgtaatcctagcagtttgggagaccaaggcgggtgggtcacctgaggtcgggagctcaagaccagcctggacaacatcgtgaaaccctgtctctactaaaaatgcaaaaattagccaggcatggtggcgcacccctgtaatcccagctacctgggaggctgaggtaggagaattgtttgaacctatgaggcggaggctgcagtgagctgagatcacgccactacactccagcctgggtgacagagcaagaccccatctcaaaaaaaaaaaaagtgacataccattacttctaccattttctattagtcagaagtgagttactaagtccagttcaccctcaataaaggacaatacacaaggattgatgtcgttgggggctatcttagagcctggatgcctcatcatgctgggcctcaaagtatttttgcaaacagcttttcaaacacaatatccacatacaatcaaaggtaaccaggaatacaaagaaaaaagacaaaaagaaaaatacactagaaacaacagatccataaagcttcagatattaaagctgcattgtcagacagaggctttaaaagctgtatattttttgttgctgttgataaggaaaagatgataaattttaacagataaccgcccaaaaataattaattaatttaaattaattaagtttcaaatttctacttcccagcatgctggtgtaattgggactggacttacccttttgtcataaacaactagaaaactggacaaaatataggaactagctcctctcagacatcagagaacaagcaagacaaaattgtgatccctgggctgagagaaacaaggtgattcttacaattacccagtttagaggctgagagaagacagaagactcctggatcagagatgaaagccttcattactcatagcaaaggtggtagccgcatatcagcatattcatatcaattacccaagtctaagttttaagggcaaaatagatggccagatgatgcctgcacacagatagagtaggaacactgagcctaaagaacccatcactttatagcaagcggtaacgaagccagctcttcatcctgaatggagacattacctcatccctcgagaccgcttgctgaaaatgcaaccctgataaataatccaggtaaagagtggtcaggaccttgcattcttggcatacccagcaagacatgtaagacctatgggaaaactgatctattcgaatgctaagtgcatttcatcttaggtagattagaatgatagctctaaaagctgaactattttttgccaacttaaaaaaccagactgtttatattcaatatttttattaatcaaatgagacaattattcttaaagctaggttttaagaaacagagacaagactttttgttttagttcaagaaatataggtagtgtatttatacttcttatacaaaaggaagcttaaggtttaactagattttactctaattccttttctattttagcttcctttactggcatataagtaatacttggtcaacaaggttccaagagagctctctttcccatattcacaggtattaagtattatacacaaaaactttctcagcatctggtacagtatttagtgcagcatctatgaagtttacacaagattcctgattaaagaataatttgaagaaaatccacaggaagagatagttccaattacatccagagatcattccaactaatctggtatacattttttaaatagaaaaaatcaaaatgtgtgcaaggctataaaatccatttatatgtttatggagtatattggtatagaatagaaaataatttataagcttaatatacaatacacctgatggctgtcaagttgtcctatactttggatagagttcctactactaagttgcatatttaacttcagtcttttacaagtgagcaaggattgccaggcatgaaatgataccaggttatatttcctattagcaaaataaggtatatctcaataatttactgttttacactatattttaagtggctttaactctaaatacatactctatagccactgtaataatttaaacatggaagcctatcaattaaaattgctaaaataatgaaaatattcaaaagaagcattagccaattcttgtaaggaatttgcagaaatgtcaaaagtttaaacaatgtttgtaattttaccaagaacaaagaggtatattatgtccaagtataatacttaatatatttacatgtttctggaaaaaatggaatgaaaatagatatttgtaggttgaattataatttgaatgcatgacgaaaattacacctaatggcaattttgaagaaatcatttataaagaaaataatctcttcataaaataggtgtatttttataaatcagacttgtttaaaacaaggtatatcttaaatgctttataaatgtttgcagaatgatattcaatatcataatccctgtagtccgatgaaatcattctgtcatatgttcatgccaagattattgaatagcatgaaacagttttgaagatacatgcacatttagtcattgtgatgtgtaaaatctggcaggtacacatttaaatgagtctgactaggtagttggtttcaatgcctgaccaccattaccctaaaagcaaaacctcatcagcttgctatttggtgtccacagttttctctgattagttgtttcatatacaaaaggattattaaatatgggcagttctccagccggacattcttacccaatgactagagagttttattgcacatacatgtttcatgagcagtaatatcacattttgaatggtttagaatgttttttcagctcatctagatacaaatcataaaataatcaagtccaaaatgtgcagcagtattactgaatgcatgttacaatcatatatgattacacatagaaaagtttaagcattttcttttaaaattttttccaggattttctttgaacactcatgtcatctaaaggtccccaatgcagaattttctcctcagaatcattcttttgcctgaccatttctctatgttagcttctaattattcactggacacttttatttatgaatatgttcattaaaatcctcacctgccatacagtatagaatttcatttgctctaaagtcatgttttgatgggatatcatgttaatttatgttatactagcatccagctaaataagacaagattagtccatttcataatgataatatttctttattgctattgatacaacggtttctcctaaaataaaaatcctacatttattaactaatttattaaatttattcactgattccttctctgaataccaacttggctctattcgttaggactcctaggcacagtagtaacatattacaaactattcattaaaataccaaatatttattgcctactatgtaccaggcattggtttcctaggactactaaaatacggatcatgctattgtgaaggcacttagagactggtggaagaagagaggaagggagagacgtgaagaaggaaggaaacggtaactatgtaaagtgatgaatatgttaattagcctaattgtggtgatcatttcacaacttacatatatatcaaaacatcaagttgtacaccttaaatatatacaatttttacttgagaattatacctcgataaagctgaaaaatagcatatatatatttatacttgcttgtatatgcacagagaaacactggaaagacataagaaagtaagagaaaaggttgtttattggggtcaagggaggctggtgaactgggtagacacaggagtgcaaacatcttctcaatataaaaatttctattttttttttacttttggatgtcataaatgtccaaaatttatgacatttaatttaaaattttaaaaagtgtattcaatacaacagtgtacaataatctataattactggaggaaagatgcaaattagctttgaacttcctagaggtcatatcaaatggagaattatgttgtttcaaaattcagattttccccatattaagacctgaaaggaatttctctactgtattctcattaattggatattctgtgatgtagtgaatgagaatcaacatcttcttaatatgtacttgtaagtttcaaatcattctcttgcttaaactctcaataccctccaatttgattggaacaaatccaaatctctcatcacagtctgtgacaccctacatgacctggccctcacctgttctcccctttgatcacaaagctccaacagcagtggtcttccttctgtcccttgaccatagcaagctcctacctgtctcagtgcctttgtacttactggtccttttcaccttcgaagtcattctcccaggtagtattagcatggctgcctccttatcattcagttctcaactgtaacatcatcctgttagacaaacctttccttcctactctcaataagagcacatcaccttgtccccagccactcttgagcccatcctgctgtttttattctttatagcactttttacagtcttctatttcattatttctattttctgtctgtcttctcccacaagaaaacaactcctaaaagttgttgactaccatcttgtatcatcagctttctacaacagggcctgagacgtagtgggtggtgaataaacagttgaatgaatgagtgaatgacaatgaattagtgattgtgaaagagaatgaaagaagcaagaaaaggaaagatgcagagagataagagaaagaaaggaaggaatctcttaatattcaacaatttttagctaggcacagtggctcattcctgtaattccagcactttgggaggctgagcttggaggatcaattgagcctcaattgaggagtttgaggctagcctgggcaacaaagcaataccccatctgtacaaaaataaaataaaataattaaccagatgttgtggcacttgcctgtagtcctagctactcaggtggctgaggcaggaggatcacttaagcctaggagttctaggctgcagtgagccatgattgcaccactgtacttcagcctgggtgacagagcaagaccctgtctcaaaaaaaaaaaaaatgtcaaacagctgtgactaatattaaataagatctgtcagctaattctgatattaccttgcatgaggtttttagacttcaatggcttatacacaattttaaccaatatttacttagagtacaaagttttaacgctgctgtacatatgtcactcatctcataagctatgtatctcaagaaaattattattggaaaagtcctaaaagtttaactaatacctgtagttaaattagatttatcataaatttatgtttgtcaaaccatcttccccccaaagaaagaattcatgaagcaagactaaggattctgaaaaagattttaccacctaccaccatacttttccctttgtaatacttggtcaaagttaactaacaattattacagtatagctagagcttcaggtagactggatttgggcaaccacatttggatatcaagagaaggaacctgaacaaggatctgctggatcactggatttctgcagttgcactacagaagcaatctaacatcaaaacttaccttcttccagcccttcacggtggatgaagagaagaaacctacaaatggtttctattaattggcccagaatttcacatcctttatttctttgtgtgctggctagattttataaccattgccatgtgggttcaggacaaactgacttgcttaaaatcacacattaaaaatgtttcaactccacagtgtctccgacagcccagtttttgtttcagaatgattccacaatctatacaatgtgtaaaattactcatacaaagattactccctattatttgcatatgttaaggttcatgtgtgttatttattgcagcataggtctgaaataaattatggtttaaaaatatgttcctgataatacccttttcatatcacagcatgagggcaactggtgtgaaaggcttcccacttgtgatcaaaccatgcttccctttattttcaaggtcagctataacaagagttatgtctataactgagttagaaatggtttattgtagtaccttaactggctatcctcagtcacagatgatttttacttttcagttaataaatccagggttgaatttaatatccattggccctcctgagacacatatgcacaatcctaagaggacatctgtctcagagagcaaacatctctgccatcctcaaaactaaagtcgcattatggtcacgtgcagagcatttgttttgtgtcttttccattctctaaactttagagaatgctttagagtgtgagattgaacttttccctggaagagtaattgttcatgcaaatctgtgcccaatcttcacaaaaagtgtggaaaaaatatgcaagcagaagcagagaacagcaatgctcacagtccagattttaaaggtgatgcatagttaggtcggtgatttgaacactgctggagctttcagactgaaaaatcatcttcttatttcaatagtaatggcattaaggattctactacactactacaaatattgtacgcctcatgtcctgttagtctctaacaaaaacaacttgctattaaagtacagctctgggcaaaaaaaggtggtttggattgcaagaagttattaattaacatgacagcaaagcttcaggacatgaaaccacaaagcagctctctggctggttgtcaacagtgtcacacatatgtaaataatccacagttttaaaaggctgttttctcttctatactttatccccttgacaatgattgtaattttctgtactgagatctcttccaagtctaacatttgtgactacagaacagtatgaaagtaatcttggttccaattgtttctttttaaatctcataataataaaagcatcctagaaatgagctctgtcatattcttaaagacaactgagacaattgtcagtatatctatccactgtaatctcagctagcaggtaacaattaaattaaattaaatcaaatgttgtgggatattttaagccatttttaaagaacactacctttttgtcaacatattagaaagtcctcatttttcccctaaacttttggcatacacaacatttccaggaaactgttcattaagactaactgcaagagaaagactcattctctcaccaaaacgtctacaattaagttcattttataatagtaattttttaatgaactgctaacactgacggaagcataaagactttgtaaaactgccttggatatgaaaacccatattaaatatgtaggtttcagagatgaccccaccctgcccacaatacacaaacacacacacaaacacccacacatacacattcacatacacacacattcacatacacacacatatcacatcacacagagaataaaatctctcaattgacttcattagaataacatttcagttagaaaccaaatttgaaaatcattcaacagaaatgtatattttaagtaccagccaactcattttcattattaagtaaaattaatccatgtgaagtaaggggaagcaacacagtgcctcaccaagatgggagtgtccagggcctagttcagctgctgctcagctgtgtgaccctggataagctacagcacctccctgagcctacagaaatggggaaagccaatcgggtgggctctatcatctcttcagctgctgctccagaaatcctcaggctagggttacttcaaagcatcccttctgcatagctggttctactgaccactccaactctatgtgaaaaaccttggccaccaccacaactctgggctcagtgcatccagacattctgattcccagagttggggagcacttcatcatgggacacagtgatcattccgttaaactaagcagaggccgctatctggttggtcattcggtcttcttgtgccgagtgaccagctgcaaggaaagaagttactatgctatcaagaataatggactctgatcattaagaggaagggagagctaatattatacaatgcagacaggggagaattcatttgacacccaggtgacatatggaaatgttttttggtgcgccttgcccaattttgatagcaaatggacaaatgtagtggatacagccctagaagggttatggtattcaggtgtttgacccttccgggatgaagatctgagtcacaccaccttgacagagaggggtgctagccaagcgtgaggggattctagaatgggcaggagaagcggaagatgatgagtatcagctgtagtcccaaaaccatctgcagcagagagatacggcccctcccactgatcttcttgtaagtttccccagaaaaagaaaccaaccagagtccagaatcctggaggagcagttcccggatggaataaacaaacatttaggaagtaagtggacccaggaagcccaagaggggctatattcatttccttaggctgccataataaagtaccacaaactaactggcttgagacaacagaaattcattatctcacagttcttgaggacagaaatcttaaatctgagccgatattaaaggtaagtaggtatcagcagggccatgctccctccaagggctctaaggaacaatcctgccttgcccttttcagcttttggtgactcctggcatttcttgctttatggcagtgtaactccagtctctgcctccatctttacagggccttctcccctgtctcgaacttccctttcccttgtctcatgacaccaataactggaattagggtccactctaaatccagtgtgatctcatcttcagagcgttaacttacatcaacaaagttcctatttctaaataaggtcacagtcacaggtgggctgcagtggatggcccagtgccctgcccagaatcccctttcaagcccaggcactcgttcctccatcaggcagtgtggtgtcccccagaaaaatgccctcagctaaagggagcttcctcacgcaaggctatgccccttcctcaggggcagccccctgactcaactgagcacagatctgaagggcacctccatcccagagctccctacaggagagactgaggtcttgctgtgtttgcatcatggttcaccttcctctacgcccgaccctgctgccctcactgctgtccaggtgttgttcccaagagcacacaccaataaactacgtctgtcttcagcagttgtttccggggaacctgaccctcaggctccccgatcccgggccaagcctcttggccacttactagtggagaattttggacaggatacttaaccatgctactcccaatttttcttatccatgaaataaggataagagcaataccttccatgcagggtgttgtgaaaatgaaacaagttaattaatccagatctcttagaatactgcctggcaacataggaagtgctccataaatgttgattacaagctactattataagcatgttttcttctgtaggaaaaacattcattaaggaatgaattcgtttttatattattattgtattttttagcttttcctaagttatgaaccagtaggacaatgaatctaaaatcaagttataatttatattatttctgataatctaattataataaaattaaagtattactactatttaaaatcactattaccttatcctaattgccacattaattaattttcagcaagggaatgtaataagtggtttttgaattttttatacatatcaaagaaacaaatgtactgaactccttctgtaaacttatatatttactctaaatttaatatatcaaacccaacaaaatcagaaaggggcaaaactgtaatttaaactgaaggtttaatatttcagagtggctctggatcttaaaatttattagccaattaaagtatcaaaaaagtaccctatagagttcttcccatcaaggctataaattaacccttggagaacaatataaagtttcaagggtagagtcatttaattcataagcttaaaggactgaaatcttaaaggaataaattagccagactttttttttgcatttagtacagccgtatcttaaattagtttttctcaggattaggatgtattatttatgaccacgtccagtcccattatttgttaagacaaaagcaagtaagtcctagttagtcaaagtaaatcaagaaaattaacccagcaggcagaggactcacatgctatttacctttatgtagtaaatatttcccacattgcttcacccagaaatctcacccagtctattaagaggcagtcctaacaacaatgtctggttgactttccatgcctccacttataagaaatagctgaaactttttaagtgcttacatgtgctagtgctttaaatacattatcttcaattctcaaaataacccttcaaagtacatattattatcccattttctagattaataaaatgaggttcaatacacacagcttatgaaacacagagccagatagattcaagcctatctgttctttcctcttgctgtgtctcactgagcacataactattaataaatcaactcatattctgcttaaaaggattgggaaagtgcctcacaatattggcatttctccaaaaacaagaggaaatatatctactataattgtctttttacgttttcaattgttttatttttcaaactagagaacagaataaactaaaaagttaaaatattgtgttctcaaatctgctacccaaatttttttcataacaatgagaaatatatatgctttttaaaaagtgatttcttacaagtggagacatggaaactcaaggttaaaagaccaaacagcagattattaacttgagacatttaagaaacaaaatcactctggtaatatttctgctaatatgcaaaattcatagcttcatattctgacagtaaagagaggcacagacaaagatcatgttttttacatgaaatggaaagatctgtctgatacgaaattacaacacaaaaagggtattaattgtcttactgttgtgtaatgtttatggcaggcatttcaatgacagcactgcttttcagaaagctgtaagaacatgaaagattatagatagacttcactgttaccctgcagaatgtgcccagttcttcaagtaatcaacactcttttatgtggctaccatgcagggcatttcattttatcattgaacaaattttacttttattatgtgccaagtattttactaagcactcagcagtaggcaagatgggtaaggtctctgccatcatctcatgatgcttataatgagcagggaagcagatactaagtggttacctgtgaggaatgctgcagaacataagacgcattacgtggtatcaggaaatgtcaggttctatctgatatatgataagagatattatctttactattgcataatgcatattatctttaggtgtttataagatgggaacttaactaacagtgggcaagtggggagcttaggtggtcaaggaaggcttcctaaggacatgatatttttaagaaacaagtaaaagttagctggggaaggggagactcatgacagagaggacaaggacagcatattcaatgcaaagggaagaactagagtgtcttactcagctcaggctgccataacaaaatactgtaggctgggtggcttaaacacttaaacaacagaagtttatttctcatggttctggaggctgaaagtccaaactcaaagtgccagcacggttgggttctggtgagggccctcctcctggtttgtggacaggtgacctcttgatgtagcctcacgtggcggaaagagattcaactcctctctctttctcttataaggacactaattccatcatgcagatgcaaccctcataacttcatctaaactaattatctcacaaaggccccacctcccaaaaggatcacattgaggattaggacttcaatgtatgaattttggagacatactaacattcagaccataacatagcacaaaggcctgagctgagaaaaagcacggtgcctttttgaaatacagaggactggggaagagtcccttgaaacaaggatagagaggcaggcagaatggattagatgtgaacttgatcttacaagcagtgcaaagccacggaaggtgctcagcatgagtaacataatcagatttgtgttatagattatttggaaagaaagcaattatcaaaggaaatgtcagtttctatctgatacatgataagagaacgttgtactcagtgagagataattgtgagatatttgggtcccagagcattgactctcaaaaagagaaatagcaaaataaatttccacttaagatgaaagtgtctttggcattcaaaacttagtctttatgattgttaacaatcctaggtggttcttatcatgtggtcagagcttgctaaggactgacgttcctcaaatgggtcacagtgaatgacttttcctatatgtcctagtcaatcccaaatagggtgggaaatattatcagctaattcatggagttgatttctattcctacttttccatgaaggattatcacaattattcaattaaaattccataatcataaatacatgcaataatttgtttacactaggtgaagcttaaaaatacttaaataattttaaactgttagcatttactactagtaacactagttaatccaaaacacattgacctagtaaacctttgcagctgtgcacaatagctatcactcaagaacaatgtaatatattatacaactagagtaaaattctacaggctttattttcaaaggactcttactattaagtcttaatgatctgaatctcattgaaagtaatagaaattgaaatgcaagaatacagcgggagttctgcttctggtatgactgagtatacgcctactgaaacctaccctcctgcatgtaacaactgtaaactttaaataaaacagaaacaaaaatacttgaaccttctaggggtgagtaaaagcattcaactttttacaaggggtccaaaatggaagaatggacctatatggagtgagtttcccattttttgaggattatttatttaggctgtgaacctgaggttgggtagcagtcaaggcaccatgcagggtggttagagtcactagaaacacacagtctttctggacacaagaaccttagcatagggttccaggaaaccatagccattagagagaaagagggaactcttagagaggggaaatccgggcaagctcgaaattctgtacataaactatgcccaaatttctgactgacctctgagctccacatgcatgggatatggactgaaaacagcccagttaagaaaaaacagaactgaaatggggctttcacaggtgcctgagagtcagaatttgcagtttgagtccaatcaagttgattacctgctaaaacaaaaacatcaacattattcagaagaatgtaacactcagaagaatctacggtctccacaacaaaacatacacaatgtccggaatacaaggaaaaagtattcaatatctgaaaaactagagaaatatgatacatttacaagacaaaaaacaattaaagaagccaaacacagatgactatatttcacagataaaactttaaagcagctattatagttatatgaggtaaaggaagacactcttgtaatgaatgaaaagatagataatatcagcaaagaaacagaaactatgagacagaataaaatgaaaattgtataagtgaaaaatataataaattaaaaatgtgttagaagggcttaacagcaggatggtgatgaagaacatgacagtgaatttgaaaataatacaagccatctgatctgaagaatagaaaagaaaattattgaaaagaaaaatgaacagagtctcaaggcctcagatctaaaggtctaacatatgtatatttggaatctctgaaagacagaaaagaaagaatagagcagaaaaaaatattttaaaataaagaaaaagcactctctagaaagattcctgttggcacatagaataagctttctcattttaaaaaaaagttttcttcacaagtaacagacaaatgtggtaactgtacttcagaggttaaaacacatttagagaaataatgataaagtagccttaagatattatgaatttagattagagcacagttgtactcctctgtataaatggcaaatctgaatactattgtgttccaaaaaaattatctttcttttaaaatctactaagaatcaagactcaaggtaaacttattaaattcatgttgtggtattaagagtatgctgtgatatatgtagaaactatatgtttaatgccagcaagcaaattacctctaataccgtcaaacattaatttataaattggcctccctgtcacctctcttctttatgctggacgctgatagaggcagtggaagtgaaacagacataagcatgacaattagattctacacaagaaaaatgccatataaaaattcttgtaagatgagtccaggaaatatatctgacagctctgaaatattgtgttcttgtttatacacaatgtaacagaacagcctttgtattatttttaaccgttcctacttaaaataatctatacttcaaaggagagtaaacagtgcataagcttaggttgctctttacctcataacttggttcttgtataatagatattcttaggaccagacaagtcaatctctaaataaacattaacttcctctgtgtttccaaatgtagaaataaagatgaacatacaacatgaggagtttctaacaaaacaattgttaaaaatcaaatcgtgtttaaggccatatacggtaaggctaaaaataatatttaatcgcttgaaatcatacccataacaattgctaattctgcacagttaattgaaatgaagaacaaaggaaatttcagaataatctgaacaaaaaagctttgaaaagttggaggacggtttgtcatattgaacagaatttttagattaactgtcatcagtaatgaagccactcaaaaattgccaagttctgtttggttctttcttcttagctattctcatgaaagtgaagctctactacaggtcttccctgccttttgccataatacatttttcaaaagcatgaaggagatggcattttctaatctgagaatttagtatgaaatacatcaacagtgtcatcaaagcaagtatgcaataattacaaattactgtagtcatttaaaatagaaaataaagattttaatttatataaagcatgcataaacaatttacttgatttcatgaagggctgtcaatatatctagtacacacataatacaaatcaattcaactgaaaaagttttacattaatattcttgttaaaatttattttcttgaaatagagatagggttttgttatgttgcccaggctggcctcaaactcctggcctcaagcactcaccaacagaggcctcccaaagtgctgagattacagacatgagccactgcctggcctaatattctaattataataatatgttaacaattattttaataatgtttcctttaatatgcaaaagaacttttaaggaaagatttgtgttgttcagctttcttaaaagtggtatacaaatagtttttaactgatgtccctttttgttggtaaattttgtacaaacagctcctgtttagctgtccaaggcaggaagctgactgaatttgggatggaagccctgggtattaattaggacaatggttttcctagagtatctattgagatcatatctctagccatttaacatgactagccataggaatttttaaaagaaagaactgacttttattttattatttaattttattttattggagacagggtcttgctctgtcacccaggctggggtgcagtggcgcaatcatggttcactgcagcctcgacctcccaggctcaactaatcctcccatctcagcatcccaagtagctgggactacaggtgcacatcaccacacctggctaatttttgtattttttgtagaggttttgctctgttgcccaggctggtctcaaactcctgggctcaagctgtccatccacctcagcctcccaaagtgctgggattacagacaagagccaccatgcccagcctgacgtttctttttctcactctctcttagctccatagtttaatcacactcaagtgaaattacatataatggtaaactttcctgggagtttaccatgtgctaggcagtgctctgtgtcctggatatgcatcatctcatttaatcgccacaataaccctaccaggtgaatcccattatcatccctattttatggatgacaaaattgaggcttacaaaggtttaggaatttacttgaggttaagctattaagtaacagagctgaaatttaaacttgggtatgtttcactctgcattgcaagcttttatccacgggattactcttcttctgtccaaatgaaggacacctggaaataatgagaacgagcaaacctcttccatcctctctaccaaggagttttcacacacttcatcagtggactctgagatctgcatgtttatgggaaagtgataaagcctgaaatgaaggtaacagcctgggctgtttaaaaggaaattcaaaacagaattattgagaaaggaagacacggtgtcttactgtacagatatggtagggttagcatgcccaaaaaccatccagtaaaaagtgagtgtagcaagatgatttaaacaataatcaagactaagacacttttgcctgttcaatagaatatactattttgattgattcaaccatttcttctcatatgaaacatattagttaatggcttccatcaattacagtgtataacattaagaaatgagcaaaaataaattccatatgtcatttcttacactttagcagctacatttttttcacaacttcttgacactaacagatgagaaagaaggccacttttgctcaagaaccaaaacagagtactgagtccatcgtcaagagatatcagacattgaaaaagatagcagcacaggtttccagaactcttctttgagtaggaaagacttggggaaaaaaatgggccaataggtagcagacatcaactcctacaggacattgaggaaagaagtgagcgaaaaagaccctcacatacttagtttttaaatattacaaactatgaaagagtcgtattatgtgctaagagaataagtaagtatagaggtagaggtaaaagataaaggagaaatggagtgattgagaatccatgtcagagaagatggaataggggattgttggatggatggatagatggatgggagaatatgaatgggtgagtttgatgtggacaaagaaaaatcatctagtccctagggattggatagtgcatttacagaaagcctcatggtggcaggcaaaaacacaagcaagttttcagctactagcctctactgagtaggaagcatagttacctgtaaagagtaaaggcagcaggctatggtgcttaaagcgaatgaggttgtggaagagatgcttagatgaatacaacaaaattactcaacagaattgagggcctggctgatattaaaataccatacttaaattctactctaagtagactctattatcacttggaattactccagcagtcccctgtagtctgagtgtttcagagagtgtgtggggcagggggagatatagttggagagatctactgttggtaatatgtatacatgtatggaagaggaagggttagtttggtgcatagaagaattacaaccgaacagagaaggaactaaagcaaggaggggggtgatatacaagaagagaaaagaaagagcaagtcatctagaaaaaaatctagattaaaaaataaatgcaaaccaaatcaaaggctgagaaagcggaaaggctggcaagctgtgatcagagagtgagatgagacataagaggtagagttgttctaagtgattccagattacaggggatggctgtaggatagggttcctggagaggaagtaacaataaggacatcaaaactgggtcaactgaagaaacatgagaccaaattgcctggatgacaagagttacaatggggacaacaatgactaaaacaggctttcattgtcttcactgcacatggggactgaccagatggtccataggaaacaggaagaagaggagagagaaacaggcagattcaaataacgagtgccttaatgcctgggactgtggcatgggaggctgaatatctcagaagctatgctgaggagctcagaaaatggagtaagatgccaaccatctctctgggttgtggtccttgaggctcaggaatacaagcacatagcattatcatcacagagacctgccccccaacatcatatgagtcgcaagaccctcgtctcagccagcgtccttagccattgactcttctcccattatcctgacactttcacagctttaagtatcacctccacatgagtaacttccaagtttatgtctccaaccttacattctctcctgttagtagttctgaagctctaaatagccttcaagatgtattttcctatactactggccgttaattcacactgaaatcaaaaactcgagagagccagcatctttcccccaaaactctcacctccagcttttcctattcttcccactaatccagatggaaaacatggtgttattttttactccttccaccagtttctcactcacatctatacaagttgtaccaattattcctttgtgatacctctaaggccatccttcctcttacgcttcactaccattcccctaattcaggcccatgtagctgaatatgtgttattacaagagactcagaactctcctacctggtttccctccttacttctttctattctttctactaatttaagatgactcttcctaaaacgttacttttcacatgtcaatctctattcacaaacctcccattatctcccatgtatttccataataataaaggccaagctctgcgcaaacactgatatctcccatgtctccaaaacagcctcccattacttcactacaggaaccagacacaccgtgattattccaattcctcctatccccatggattacatagattttcaattaattcatacttccgattatatttacctgatctactttcactacaaaacacatattttgattaaatgaagattttaattcagtaagattaaaataacctggcatttgtaaaaatgatttcgcataatttccctaatgggctatgaaaatataaattacttccacagttgctcacttttcatttataatttaaaaggtgaggggaccattaatagacatctggagtttagttgttactaaaatcgatttattgtaagatttcaatcctcagagaagggaaatcttactgatcacaactttctgaagtccatcctaagtggttctcttttggagatgatcatacctagaaatgcattacacattcctacatacacacaaaatgtgcagctacagtggaatgcatccatgacaggttgtaaataaaaatgtacataacagagaatccccgatctactggatagatctactttcccacctataaagctctacaaaccactttctacctcaacataccagttatctccaatccttacatccatgtggtgttatgagcttttttttttaaatgaacttctgggaatatacaggaagagattatagaaaggcaaggagtgaggggaagacagagcctttgggaatgcctctaccacactgagtgtggggtggcacaagagaaaaaaggaaaaagaggaattggcaagcgagaggcagaatgtaaggagacaatgggcagtgaaaaagatgcatgcaagaaagaggaagtggtcagcagtccaaaatgcttcagagagcatgagagaggttatgactaagaaaagcccattggatttgaaagaaacagatacacgcctcttgagaggcagaatttagtacagtgatgggagaaggtcagaacacatggagaaggggtgatcagcaagtgggagtcaggcacatgtcattcattcacaaggactgacggagaagggaaggagatggagaacacacacaataagctctgctagcaagcaccttgcccgttttgcttgttgctgtccccagcaccaagaacagttcctggcatgtaatagatattcaataagtatttgttggttagatgttgttgaattcaatcaatgttattgaattaatgaatgttgttgtttggataaataaatgaattgatgaatgaacatagtacttgtatttgagggagtatgaaagaatactcttcatgttaccacatgtaattcaggtctcaatgctggagttatacttagtacagactaagatctggttataagataaaagctgcaaatgcagctcacaacatcagacttagtgtagggtggaggatggagctcttgtctagaggttgaagttaatctttttgacagttatctgagcgaaaatggaatctttcaggccaaacatgagaactggaggaaaatctctgggtgtctgcagagtggaattccctctctgtcttgaccaagaaggcagcaagagattgaaaggaactcctgaggggtggattgttaagaagaggctgtccacctgagacaggcagggactgagttattaagaagtccagacgagtgcctacaatgttgtaaaaaccttttgcagctagaggttatctatctcagtttgctaatggttcttgtcctctgcattaattccctcagttctgcctcactcataagtctttggaaaggtctcgtcagggcatgagaatataagagttcagccaacactcggagaggggagggtggccagcaccatagtgccagcaacagcagcaactagagtggtaggaccccaaacattggggatgtggagtaaccactaagacaacttgaagttaaagggtttgtttttatcagatgacatggtattatcttacaggaaatctaggcaagattttgtttttcctgtatttccttttgtttttgtttgattttgacaaaggcaacttgagcagatataagctgtaaaagaggaaaacttgtagatggcaacagaaagaaggtacagttacaaggaatgtatgtaatgtcattaagcaaagccatggaacacaggaggtgtcatgagattcaaaggcaagatgggggagttggtttttgcaaagtggtataaagaaagattgagagagtagaaagaaggaagacgcttctttgaatctcatatggaaattagggggtaagtcagctgtggggcgtatggaacacagaaagttcacatagctgccttggagaggccaccagagagcccagtgactaagaggcttttgcaaatcttgaggggctagatcgctggaatttccagaaattctagtcagcacaatttaatgctgtctgcagcaatacttggcaacctggaaaggtttgttgcaattgttggaggtgcagtcctacatgtaagccaagctgagctcaccataatggatctaccacatatggagttgtaacaatgggataaactcacacctcatagaagaatcatctcacgatgatagaaacaactctaaagacaggctttcatcaaaaaaatcataattaatccaccctgcttattttcctaacaatggagccaagttgtactattcataccaagatcttcagggagttccaggtggaaggaatattggaagtcaacttgtccaacctgtcacctattatgactttcatttttagaaatccatggaagaaactatcagtgggcactggcatacccgggctcctctacatttctcagcctcctttgcagtacatctgacgctgcatggctgggctctggctaatgtgacattggcggaagttgtgtaagtcactctcaggcctggctctctcagacggaggagaaacagccaagttgcttcacatcagactctgcttgagagagaaatatactttgacagtgttagtcactaatatttgtggatttgtccatttcatcagcaagcattaattcatatcaagccactttttaataatctagcaactcagagctggcaatcactctaaagaaagggatggagattattatcacccatatacccaaaagattaaaatggtggaagcagtcatgaaacccacttttactttgcagtagcacctcaattatctaaaggttattatttgagacataatttgcaaagctaaagcctgaactccctaactgagaaccagaaagtaagcagcaaacatcttaaaacaacccaggctgagagcaaaattaagctttagagcttcatgccctggtaagctcttcaggctagatatatttactcaagttatttcagagtaaataaatcagtcttggaactttgattatctcccatcagataagaaataggaaattggccaggcaaggtggcttatgcctgtaatcccagcactttgggaggctgaggcgggagtatcatttgagcccaggagttcgagaccagcctggggaacacagctggacctcgtccctacacattatttaaaaattagctagccatgttggcgcatgcctgtgcttgcagctacttgggagactgaggtgggagaatcactttaccctgggaggtccaggcttcagtgagccatgattgtgccactgtactccattttgggccacaaagcaagaccttgtctcaaaaaaataaaaaagaaacaaataggaaatcggaagcaaaaaaaaaaggaatggcctggaagggggcaaaacatgccattctgatagtgaaggagagatcaggaaaactacaagaggcaaaacacccaaatcaaaaagcagtgtacagtgccccattttataaaggataattgagtcccactgcccctcagagtcctgaaagcatcatggaagaagcttagctcacacctgatgctaactaataaagatgacttcagtcttcatccaacctttgtaagcttcgaaggaaggtaggaaaacatgtaagaagtctctggaaaaggtaactcaaaacagtgtcagtgtataaagatatacacttggtcattttaaaaactcacttacgagaactaccttattccctaggttgcctcataaagctgttaaaaaaatatatgagacattgctgggcgtggtggctcacccctgtaatcccagcactttgggaagttgaggagggcagatcacctgaggtcaggagttcgagaccagcctggcaaacatggtgaaaccccatctccactaaaaaaatacagaaattagccaggtatggtggcaggcaggagaattgcttgagtctgggaaaaggaggttgcagtgagccgagattgagccactgcactccagcctgggcaacagagtgacactctgtttgacaaaaatatatatatgtgtgtgtgtgtgtctgtgtgtgtgtgtgtgtgtgtgtgtgtgtgtatacatgtatttatatgatatgatgtgagacattgtcagttggaagaggtctgatttagaatgggcagttcctcctgaacctatttaggtgcatacatccagcaggaaagaaatcaggcttcaataagataaatcaagatctaaaagtcaagttgaaaggaccttagagatcatgtagccaagaccctggcaaaaaaaagttaggtgactagagggcatcattcatctcactgtagagggggcactaccgccagtcttgtatttgagagccggaatattatcctccacatcacaatttcctaggccaactcacaaccctctccatcccttcccaagccttcaggttggcccacaggcctgatgcactcacctgcagaaagcagtgtccaaccggggcatgctctgcaatggtggcattgtacacctgcctccagaagatgggctcattgtcattcacatcatctacggtgatgctcaccaggcaggtggcagagagtgggggctctccgaggtcctgggccaccactttcagctccaccgcctcctggacctctcggtctagagtccggatagtgctgatcgcaccgctttcggaatcaatggcaaaagatggtccacactctgcggtgtggaccatctttgattgcagggagccgagattgcagggagccgagagttggactacagtgtagcgcagccaggcgtgatcactgcctgcctcgtcggcatcggaggcgctgacccacatgactacagtgccaggggccgcggcctcggacactgaggccttgtaatgctgttggctgaagagaggtggttggtcattgaggtcagcgacccggagtagcagcgtctcctccgtgctcagcggcggggaccccgcgtccgtggccaccagtagtaactcatacagatcgcggctctctctgtccaggggcccctccacgcaaaggaaaaatacccctggggggccgccgggtagcaacgcgaagtctccctctccgccttccaaggacagagagatgctcccgtctccaagacccacaccaagctcccctgtggcctcatcttccttctcccagtcaccgtccgcgtcagacaccgagacgcgagccacgtagtcgcccggtcgggcgccttcagagacacgggcgacgcctccctctgtgagaaagagcacgtgaattgctggccggttgtcattcacgtccagcacggcgatggacacgcgcaccgtggcaacctcaggctcggcgcctccatcgcgggcctccaccaccaactggtgccaggcctgtgcctcgcggtccagaggtctccacactcgcaccacgccgctcagctcctccaccgcgaagtaggccgcgtcgcccagtgccccgccgccgctacccgccccaggcacttgccgggcgcggacgctgtagcgcacgaagccattgggccccaggtcgcggtcggtggcgcgcacgcgacagacctcggcgcccggctgggcgtcctcgcgcaccgcggcgcggtactcgtcctgctcaaagaccggcgggttgtcgttctcatccagcacgcgcagctccacgctcaggaggccggtgcgccggggtcggccgccgtcccatgcctcgatctgcagccggtgcgccgccgcctcctctcggtccaagcgccgcagcagcaccagatctagaggctccaggggtgacgaggagcctggcaaaagcggtgacggtagtggccccggagtccggtagcgcaactggaagaacgggcctgcggggtccttgggcaggtcggacggttgcaccagggtgtagccctgagtgctgaacagtccggcgtccggatcgtgggcaactggcaggcggaaggcggtccctggcgggctgagctcggagacgtcgagttgcagggagtcgaggggaaagcggggcgagtggtcattcacgtcgttgacgcgaatctccacctgcaccacagcgcccagcagcgtggcggcgacgaagctgtagtggtcccgccgctcgcggtccaggcgccgcgcagtgcggatgatgccggtgtccgggtgcacgtggaagtcgtccagcagcggggagtcatcggagtcctccgacagaaagaagccgctcccctcctgctgctgcgcggccggcagcccggcgcggatgtcacctaccagcgtgtccgggggaagcccctcatctacggaaagggtgaggttgaacaactgggcagaggagcccgaggccgcccacagccacacgtgcaccaagagccagagcagggagcgctgcgtcctggcgccgctgctgcctgaccgcccatggggtgtatctctcctcccggggagcagaaggagcttcccgaccggagcccgccgctgctgacgcccttcgcccatcttccgcccacaagggctcatttctcctccagctccttgggaaggctctcgggtaactgccagcttgtggcaggatcgcagaaaaatccaggagcctcttcagtgtctgagccagagaagaaaagactttgtttggcaaacaaaccgacggcccaggaattcccgaggttacatctgcaactggtgaaagcgtcctctgcctgcagctcacgcagacagggaagtaagctctagctgcctctgccgcggcagccacctcttctgcccctggatttctttaaacgaatctcatctctttttctctctccttttattccctttacatctgttccttgttctactcggctggttgttcccccctggtaaagtcaggtgcattatttcttttgccaaaaaggaggagattatatgaagcgcgcacacacaaggagaggatggggatctggccggagtagggggtggagtaagggcgtggaggcagggagtcagggcgctggggaggagggagagagggaggggggaagggaggtctgcggccctgtccgctgctccgggggcggggcggtggttccccactgtgtctccgggcgccagggaccgcgcgactcctgctccgacccagcctccgccgcctgccttcccctccctgccgtgtgatgcggcgcacacgagggcaaactccaacctgcgagccgcgctctgcagcagggcggaagaggagcaaatgcaaaagcactgggagacgtgcaccgcggggcgggtgggggacgcgcaggcggggcgtctgcctgggcttggccaagtgccaagtgatgatgggtgcggggaggtgagaggagcggcctctccgcggcctccccctccatccgcttgaccgtccctctgcaggcctgactcttggctcgcgctgagccaagagggtagaggttatcatcactttggggtgccaaacttgtgttctccatttggcgagagggactcccgtccgcagcggaaggacagatggagtcaaaggccgatgcatagctggggccaggatggctttaaaggggagaaggcggaacttggaaaagccttccagaaaacccgagaaatctgtggcacacatggtgcaaaccacactttattatgcgtgctactacccagcgacgtgtgagcctcttgtcactcccctctgccaccaggaatgacgacaatatatccgccctgagaaccctttttctacattcagcgccatcataacacttccaggatgtctgacgatgctgactgatgagcagaaagccctggtggctgacaccccgcaagccctcagcgctcccccaccacccctaggcaaggaagtgtgcaagcgggataactctacggataccactttcaaaactagcttctgtctgagccgaacgcaaatgccaataaatagccatagtcgcagatttcccttcaattaactataataatcggtagaaactgatcaatggcctctaataaagtacgcctgagaaaagactctctggactcttaaaaatggctgaccatatttagcaagtggtttctgcaattttgcatttgggcctgagagaagaattaatttcctagataccgtttctctcctttagggaggaccaaaagccctgcatagtggtttcttgcagcaacaacaaaatgcctttttaaatgtgcaacggaggtgtatgtaattgctaatccacagccacaccgttatctctacctgtgaccaaataacaataaaataattgactttgtagcatatatgttaccgaaaatggggacattattaaaataaattcagctttctttcccccaatgaactctctttaaccattaaagagatttgttatgagtctttagagtctttttatcttcagtctctgcatttgcaccctaactagtccctcccctcccactcttgcccctttataagtaattcttttctgtttttgctattgttgttgttgttgctgttttgttttctgagtcaggatctcactctgtcacccaggctggagtgcggtggtgcaatcatggcgcactgcaacctcatggactcaagtgattccatcacctcagcttccagagtagctgggactatgggtgcccaccactatacctggcaaattttatattattttattaatttatttgtttattttttttacttttgtagagatgaggtctcactatattgcccaggctcgtctcgaactcctggggccagtcttcctgcctaggcctcccaaagtgctgggattacaggcttgagccaccgcaaccagcctataagtaattcttgaacaagcatctggattaatgtttttaaagctgtctcaaatcatattacctcctgcttagaacctgaaatgattccattatacttagattataattcagactccttcaatcaagctccttttagtagtacaggatcctatccatctttctgaccttgcctcataccaccactctggactcagccatctgccttctttttgatcttgtacctttgaattgttagaactttccatgcctgggagttcttttttctgctttggaaagagctagctctttctcattcaggtctcaactccaatgccctctgttaagaaagatcttccctaattaccctatttcagatagcctttctactataaatgctatatcctttcagtatatttcattcacaacacctatcagcatctgaaatcaacttgcttttttcatttgtttattagattattacaacctcaaaaccttcattctgctttatctcagcacctagaacagtacctagcatgtagtgtgtctctatttactaagtatgtgttggacagacggttggttgaacctatgggtaagtgaatgcatttgtctgttaaagtagaagttggaagccataaccaagaatgaattggccatgagaatcttcactgtaatgaattatgtctttgcaatcttactcatcttaattatttcataggacttcttgaacttatttttcagcttcgtcaacttactttgtaaaccattgtattagtctgttcttgcattgctgtaaagaacctgagactgggtaatttataaagaaaaaatgtttaattggctcatggttctgcaggctgtacaggaagcatggtgggatcagtttctggggaggcctcaggaaacttacaatcatagcagaaagtgaaggggaagtaggcaggaggaagaaaatgaatggggaggtgctatacacttttaaacaaacacatctcatgagaactcactcactctcatgaggacagcatcagggaatggtgctaaagcattcataagaaactgcctcatgatccagtcacctcccaccaggtcccacctctaacactggggattaccattcaacatgagatttgggcagggacacagatccaaaccatatcaaccatattgttaacaaatatttacttgagtctaaaaataaaggaaaagaagcatcttttactgcatctttcactgacacattctttgtaaacagtggtttagtttagaaacagtggaaaacaaatggaaaatcaagaacctcagacatctattttcctattagttctaaagctttatatctccagcatgtacaattcaaggtctcctgtccatttcacaattacccttcattgaatgtcctgaatatccttaattatagaattaagaattcaattttgtaaagtaagagaaataagagcatttctcagatatgtgaaaaataattttagataatacagaagccaacagcctgcaagaaataggtcaaggtctgatccttgtaagcgaagcatcatggcgtaactggccagagttttagctttaaagttggaaaatccttattctgctctataatttggggcaagttatttaaatcttaagccttagagtttcctcctttctaaattggggatgatacatctaatttacagggatgtcatgggccttaaatgaggcaatatatgtggattggtacctagaatgcatgtggtaaattgtatttttcttgccctctggtgtttgtatgatgaaatgttttaggagtgaattattttggaattctcagtaatatcaaactccgacttcttagccccccagaaggtgtgaagggggaggatataaaattcccactatctggctggatgcagtggctcatgcctgtaatcccagcattttcagaggccaaggcaggaggattgcttgagcccgggaagtaaaaaccagcctaggcaatgtggcaagaccttctctctacaaaaaaaaaaaaaaaaaaaaaaaatttaaaaatagccaggcacgctgatgcatacctgtaagtcccagctactcaggaggctgagatgccaggatggcttgaacccaagacattgagctgtgtcattgccactgcactccagcttggatgacagagcgaaagcccatctcaaaaaaaaaaaaaaaaaatccccagtattgtaaacagaaacttggacaaaaaggctcaaggcatttcttcactttgtgttattcagtttaagtaacacaggaagtccctcttcagaaacattttccctcagactgtaggtagccctcagctttgtgatagttaatttaaatagtgtagttgctaagtgctcaaagcagggttcaaatcacctcacgtcaaccttttaggaaaggagttataattagtattcccatcttacagatgaggaaactgaggttcaggagcattgcaagtcatgtggccaaagtcccacaggtagtagaattggaacctgaacccagttttgctccagtgtccacggtgttcactggtcatttattgtcttcatgattttctttaataagattgtcttcttctgaattcttgatgaaatcagtacagtgatatagtgagttttgggaagacctgggagaactacagaaggaggaacttgtgagcatgttagtgggagtggtggggaggcacaagaggatagtcacatgtcagtacttgaaaatacaaccaaaaaaaaaaaccaactccgtacttagaaatgtacttagaaatggtacttaaaggccagtaaggagaatcgggtgacatggagggtttcttcccaacttctcacgcatggggatggccctctgagggttaagaagggtgcatgataccaggaagcccccatactcccttgactcacatgccatctttctgaaaacgtttgagccaaagagcgtttggagcttgtgatggttaaatgtgatgtgtcaagttggcccaggctacggtgcccacattgtttggtgaaacactggtctagatgctgctaggaaggttatgtcatgctgggaagaaccctaactaatatagagctttgtggaagtggagataatttagtatttaatattatagctggtatttagaatctacatatattttgtgttcttaaagtttttaaaatcagaatcctggacctaatagggatcttaataagtaatcaagtacatctttctgtcttagattctaagccactcaaaagagatgatagtcttttcctttttttaacattagaaccaattccacacatgcctgtatgatattctcaactccacagaatatgatcacattttacagattaagaatctttgatttgaatatcaacatatagttatttgctttgattttggggaagatgaagaaaaactggtcgattatttttatgccaacacttcatcatatagttgaagggaactataacaaggcttatcgttaagttggttttatcatactgtattgaatcatagtttcagatctagtagaagctggaatataagaagtgcgtataccaaagttgtccctgcttttgaagattgtggtatttgtagatctcagaacccctagctaaggtaattcctgcctaatttccccttttctgtcctaacttgcttattctccttcccagtgcttggtaaggcagaccaacttctccccattccctccaacagactcaggatggccgacaaagtccaatcaaacctgctcaaccatataggctctacaatttggcttttctaattctgtctttggcacataccccattttgccttttgtaaaatcttttctttagatgaaataatcccagctcctcattccctcgaccctttaatcattttgtttctgttctctgaactctctccaattttcctatatattgtatcagatgcggaaaccaaaaccacacaccattttctaacaggatctatgcattgccaaacctggggaggtgacttacttcttcaatcagaaattgaagccaagtccaaaaggttaacaagtggatgttggaacaggtgtgacacccccattccaataaagcaacactttctgagttggtaattattcagtgtggaaagtgtaatctacttgctttcacataaaaaattttagaatattcatgtatttgtataagacggcatgatagataaagcaggtgaagaaaaagataaatagcactggatcctgccaatatttttctaagtgctattgttctttgtgagaagttaaggaagctgatctgtttcctgggacaaagtaaagttcactgaaatatatatacataatatatgttataataattccaggcaagagaaagcaaaggaaatacccaggactctgccaatcccacaaatattcagtgagaaaaacacctggattctccccaagccacagctgtttagttggaaaatgcctggttcccattgaatcaaggcagtcagggaaaagggccacatccggcccagtgtgtctactgcgtacgacgcacacacatgaatcctatttgatcaagacacagttattttggaaataaatagttcctgctggattcaagcacagctcgtgactagcacacacagatgggggtacactgagtgcagatattatctatgagaaactccaatacacagatatttggtaagaaaacttatggcacaggtttttgggctctgttactatctcagttatttctctcctggaacatatgtgggtttggcagtgctgctctttgattagggttgcttggatcaccaagatctgagcatgtccatccagattctttaggtcgagcagcgaatatatgtaaaatgaaatgcaaaattgataagtcaatcttgttttcctttagtatacaatcaacaatatagtagcataatcataacaggaaagttccaggactttctgaacatacgtgaattaggaaaaatcctatatctctatcatcacaatgtacactttccacatattcccatcttttcctttattggcataaacttcttttgtgtcaaaaggacacattttcactacattttccaaataacttttcatcaatccattattttaaaaaaacccactgttggccctgaaattaatctgaaaattaggcagatatttccaatgaattaagtaatcatttatacttaagatttacctactttaaatcatacagaggtttcttattgttaacataatttataaggagtgagtcagtgcttaatccctttaaaggtgtttttagtttgctatccaaaatcaacctgaggagagaacctgtgttttgagaaatcacagacttcacatctgagggttctagaatcctgaggccttgggagaatttcttttacccaattacttgctccagaaatcaggagaggttatggtggaaacagcttcatgaattcaggttctcctcatctttcctctgttgactgccaattccttatttcccataactctttgtatctcagtgcaaaaaaaaaaaaaaaaaaaaaggagagaaagaaaaatggaggaaagatattgcagaagcttctagcctcaaaggatgcattcaattaataaacagtaatctttcaggaaagcaaccctaaatcccctggtcaacaatgtccattctgaccactgcacattgagtgttttagccatcaagctgacctccagggtatctgcagtagcattactgcatgtgcaggagcttctcttcaaacacagcttcctgtgtttgcaaatgtatatgtataatttttttctctgacttcacggacttttatccccgaccctgtattttttttttttaaataaacgtagcttccacgtttttgctgtgtgctttatcttgaaaatcctttttgaaggcctccagcctctcttctcatgcattttcatccccagtctgccctgtttcacctgtgggctttattcactgttcttccttctgttaagccctggtctcttatccaggcataacggagaagcttaaaaatggccataaaaaatgtagtttagaagagatgctttaaagctcaaattgtaaagcccttcagggggcacagatgaatgttaaatgctgggaagcaaacaccagtaatcagagatgtaatcgttcatttttgagcaagtgcattgtgtggcccaagaggaaaaaggcagagctgtaaacggctgcagagtggccacagctgccaatccttgaactttgcaggtgcccagagtgaatgattccaggaactcagctctccttctgcaagaatatcaccagcagaaaagccatgttcacaaatcaagggaacttgaaggattattctagacctaatctccatagtcccctgtggtaggcagaataattcctccttccctacgcccacaaagatgtcttcgtcataatccactgaacctgtaaatacattacttgacaaaagggactttgcagatgtgattaagttaaggagtttgagatgtggagattgtctaggtggacccaatgtaatcccagggggccttagaagggaaaaggggaggaaggaaagtcagagtcggaggaggagatgggacaaaaggttggagtgaaggagccatgagccaaagaactcaggcagtctctcaaagctggcaaaggcaaggaattggattctccccagagcatccagaaggaacacagttctgacaacaccttgattttggcccagtgagacctgtgtgggatttctaacctacacaactgtaagataatacatttgtgttgttttaagccactaaatttgtgataatttgttacagcagccacaggaaactaatacaccccttggcagtgccgagaccagtttttcctcttccctgaattctctgaagtaaatattcacattcccagtgccattgttccctctcaaacatgaacatttacgttctcaatgaaaagaagacagaaattatcacagcatcagtttttgcctccagccaacagtatctcaagagatcaattcctgctggaaatttgagcagattcctttcatagaaagtgtctctcaacagtgtcaagatgaagtttttctttgatttaaatgcattatttgaagttatgtctttgtaaaaatgttttttagaaaaaaacctgtcacaaaacaacactcatgtttaaaaggctaaagatataacaatcatgattgttaaaactttaactagctgtgatttggggataatattgagttagccataatttatcagagggagagactagagtctttgggaaagagagtcaaggacacaaaggttctgtttaaatcaaagggcttgacccaacagccagaaaatggggttctggttgtactgtggagagaaataaatcccgactgtggaaacaaatctaagtgctgtataatgggccatgaaatctattcaatgggagtcagtggctccagaggtgggaacctgctagtgtgtacacaaagaatctgtttcttttcatctcctcatactcaaatggaaatgtggtggtttccaaacttttctgacccaccttaaataatatattttatatcataggccacatatacacatatacaatgtaattaaaacagtattttcatgacatcttacttacccttgcaatgtgagctatattctgatatttcctaattcttcttgttatttttcactgatgttcgttcatttacttatttttcatttttaaaatgctagtcaggatcatttatttatttttcatttttaaaatgctagtcaggatcaactaagtggtcatgacttggagtttaaaaacatagcttcagtaggactattatcaagaaggtaggtattttctttgggttgtagtagtaacagctattcattactacctagtaacttcaaacaaaatgatagcttggaactcaatacctttaaggtctttctaagtctataatttatagtttttcatcaaaagaaatattactttatctaaagtttttttaataaaataaagcaatgactaataacttgaaaccttctctccagcaagtttgtttaatttaaaaaaatggttttactaaaataattctgattccgttttggtcttcaattattagttctaaacaccaaacatgtctttctaat

SEQ ID NO: 378 - DNA, 26992 bp, Homo sapiens
accatatttaaagacaccatattttaaatctgcaagcaaaattaaattagcctggtacaggcagaggattggattgaggggtcagaatacctgggtcccagccaatgtctgccacctattttctgtgactttacggtatcaggccccagaagggatggggtggtcatcaggcgctggccaggtctgctagtccctaaatctgaattcaagcctgagagttactagcagggaccttaatagaacaaagagcctcaccccagaattgtattctccgagacaagcggcagagcccgaattgtctctatcacataagtctctggagggagcacacacgtagctgggatggccgtttttctcagacctattccctttactccacttcattcccagacttcggctccgggaagactccaggctccaggtggggccagccaggcggaggggaccccagcaaaggcaggaagcagcacagcaggtgtccagcacaggtgagggtgggaatggtgcagcagagatgcatgcgccctctgcagggtgttgggggctgtcgcagtggggtaggaccccatgtgtatccccaggaaggaggggactggtgtcgctctgccaagctgtgccctggttccttgcccctacagatcttccagtgggtgggaagatgaagagtttgaggagggccaccagaagaaaaaagaggagaggtcggcaaacgttccggtgagggctgggccgggaagaccagagcgtgagttgatgtagagtattcctggcggtgcctctccttactgcaaatatggcactcccacccccacccgcctgcctccgcttcttatgcccatcccaccatcccgccttcctgttgtcatttctttgaggcctggcacaacctcgcgccacccctgaccctggctgtcccagttcgcaagtccccaacagccctcccatgatttctgcttgtctctcaaggccctggaccattttccctgaacccttctagaactccctcttccttcctgctctcatggctttcctaacttctagaactttgcatcttggaccccagggttttgctgaaagcctactctgtgcccaacacagcgctgggtgctgttggtaaaccccagctcactactcaatagcatctcccacaaagacttgcaactcagggagcagagttctttgctacttgttgagctgacctgaatttaccgatgtctccttttcagtgtgtttccttccaggcacagtgaatcattcgcaccatctagcttctagttgccccacgtttaccaagcacacgccctgcagagggacagtcctcggcaaagcctccatctatagtgagcagtgcatcccctgacaccgccccaactcgtggttcttctctcagagcttttttccaccatgatagttcttggtgcagagaggcacgtgatgaatgtgtctgtccttctccatctaggtccaggacccagggcccatcttccatttgtaggtccaggccctcccagagcggagtaccctagcatcttggtacccaatggccctcaagccaataggtgggtccttgggggaaagaaggaggcctggagaatagcaaaaaaagtagaatgtgtggcttgggatgattttaatgaaacacgactgctgttgaagttgggggaagctgggatctcatgcttgggatatagggccccgagccccactttgtctttgccctttagcaatgtgaacaaccctcacccggctctggaagcccagggtatgccctgcttcctaaatggcctgatggtaggcctcagtgaaagacagggtgctgcaggatggggggatatgaagcttaagccaactccctccttctctggagcccaccagcagaggtaagggccaaatagggcagagggaagctgaggccaaggcaggctgcctcctgctgtctccccagtcacccccactggcaagcccctccctgcctctttcaggtcatccaggtggcccagggaaagcctcagcaggagccgccagaggagacccatggagtcgggcatctgcactattgtgtgacctccccctgccagcctcagccctcatccctgaagcacctgtccaacacgcacacactagggggtcctggggaccaagcctcttcccagttgctcagccctgcagggatgtggaacacagtgcagccagtggactcctgaggaggctggccaagggctttgcaggctcggccctgagaggttctgtttgttcctccttgggatttttggactcagtaggtaaaagaaaaaaggaaaatggatggcaaattccctgtctttctgaatccaaatcttacgattgctaggggcctggcagttctaaaaactgacttcgtggtcaagtagctttggagtcactgactgtctccagacgtccatttttgcacatgagaaatgaggatataatactacagaagaggcatcttacccaaccaatgcaccttacttctctgtgaaacacaggggatgctgggcgcaggcctaggctgtggcctgtagcctgtaggacagctcctgccagcagccacaggaacagtgatgtgatgtaacatttcccaagtacttagctcatgccccaccctattctaggtgcttagctcaggccccaccctattctaggtgcttagctcaggccccaccctattctaggtgcttagctcatgccccaccctattctaggtgcttagctcatgccccaccctattctaggtgcttcacaagtgtattctcctctaatcctcacaacaaatatatgaggtgctattatcccctttcgcaaatgaggaaaataaggcacaaagcttcagtaatctgaattcccaggtcacataactagtatgtagagaagctgggaatcaaacccaggcagtgagcactttctagaatgctgtgcagttccacttccccagctaagcccttgcttacccagagtccattgtgatttaatatcaagtgtgtctatgcccgttgtatgtgttattgtaattcataatgtaattaaatactatacacattgatgaacaggccaggtgagatggctcacccttgtaatcctagcactttgcgaggccaaggtgggaggattgcttgagcccaggagtttgagaccaccctgggcaacatagtgagaccccatgtcaatgtaaaagaaaatttatctttaaaaaaaaataaattgatgaactgagagtgggaaaagcagcactgtttctataaaaactaagttggatccttagaagactcgactaaggtaagttactttttctttattattcttatgctttatcttccagtgatggaggaaagagtgagtttatttatttattgagacagggtcttgctctgttgctcaggctggagtgcagtggcacgatcacatcttactgcagcctcaaccccctgggctcaagcgatcttcccacctcagcctcccactaggagtacaggtgcaccaccatgccaggctaattaaaaaaaatatatagagagagagacagggtctcactatgttgcccagactggtctcaaactcctgggctcaagccatcttcccgccttggtgtcccaaagtgttaggattacagatgtgagtcactgcacccagcctgtgagtcactttatttttttgtttgtttgtttatttatttattgagagggagtctcgctctgtctcccaggctggagtgcaatggcgtgatctcggctcactgcaacctccaccttccgggttcaagtggttctcctacctcagcctcccgagtagctgggattacaggtgcaagccaccaagcccggctaatttttgtattttcagtagagatagggtttcgccatgttggccaggctggtctcaaactcctggcctcaggtgatccgcctgcctcggtcttccaaagtgttagggttacaggtgtgagccactgcggctggcctctgtgagttactttaaaaagctaccgtgggctgggcacagtagcttatgcctgtaatcccagcactttgggaggccaaggtggatggatcacttgaggccaggagtttgagaccggcctggccaacatggcgaaaccctgtctgtactaaaaatacaaaaaatcagtggggcatggtggtgcatgcctgtaatctcagctacttgggagcctgaggcaggataattcacttgaaactggaaggtggaggttgcagtgagccaagatcatgccactgcactccagcctaggcaacagagtgagactctgcctcaaaagaaaagataaaagctgctatgcaattagatgtgagcaacaagattattacaaattgggggaataataataaaaatataaattctgcactcaagattgcttcaaacatgccattaactgtttcactttaaggaagcaaactggaaattgcgggtgatacataactggtgaggtttatgtaagaaagaagatgaggaatctaatcacaggctccatcctcaaagaaaagaccctggccacactttgacagatggaaaattaatgtattttttaaagttgaaataaaataatccactcctgatcatgtcagataagagaaagtagggaaggcaaaactttacctccactctcttagggtctctagctgggacagagaattaaattgacataaaacagattaacaagagaaaagcatacagatttacttaatataaattttatgtgacacaggagccctcataaagcaatgaagacccaaagaaggaaaacctaaatgttttgtactaggtcgaacaaagagccaattgtggaaaagcagctaaaatatatggggaggccagtcgcaggggctcacacctgtaatcccagcactttgggaggccaaggtgggtggatcagttgagcccaggagtttgagaccaacctgggcaacatggtgagaccccatctctacaaaaactacaaaaattagccaggtgtggtggtgtatgcctgtagtcccagctactagggaagctgaggcaggagaatcgctcgaacccaggagtcagaggttgcagtgagccgagatcatgccactgcactgcagcctgggtgaccgagtgagactctatctccaaaaaaataataaaaataaaatatatggggaggctaaaggaagataagagatattttaacaaggtctgtttgtacagaattctctcagcttcgactccctgtctctggtgataagaatgtttctttcctcctggaggaaggcattcattgttcacatgggagttttgtttcctgctttcaggaagaaaaggggaggttagagcactcttcttatacttaccgtttttctttttcttttcttttttttttgggggggggggatggagtctggctctgtcgcccagactggagtgcagtggcatgatcttggcacactgcaacctcctcttcccagattcaagcgattctcctgcctcagcctcctgagtagctggggttacaggcgctcgccacccacgccctgctaattttttttgtatttttagtagagatggggtttcaccatgttggccaggctggtctcgaactcctgacatcaggtgatccacctgccttggcctcccaaagtgttgggattacaggtgtgagccagtgcatccagccctaatttttgtatttttagtagaggtggtgtttcaccatgttggccaggctggtctcgaactcctgacatcaggtgatccacctgccttggcctcccaaagtgttgggattacaggtgtgagccagtgcatccagccctaatttttgtatttttagtagaggtggtgtttcaccatgttggccaggctggtcttgaactcctgacctcaaatgatccactcaccttggcctcccaaactgctgggattacaggcgtgagccactgtgccctgccaagacctcgcttctacaaaaaatatgaaaattagtcgggtgtggtggcacgtgcctgtagtcccagttactggggaggctgaggctggaggatcacttgatcccagaggtccaggctgcagtgagccatgatcaggcggctgcactgcagcctgagtgacagagcgagaccctgtctaaaaaacaaaaaaaaaccttccctttacctgtgtcttagcttgggctatcataataaaatatcatagattggatgctcaagcaacaaattaatttcctgacagttatggggactggaagtcagattagggttccagtatggtgacagagaggaggggcagtgagaggaagaaagtcttataagggcactaattctaccagttcagggactacctcttatatcccaactaatgctaatcccaaccaccctgtctccgaataccattacactgggggttagggcttcaacatatgaatttgtgagggaggaagggaagggaacacaaacattgaatccatagcagtctggataattatctttatcttagtgccttgatggtaactggtttgttactctccaaccttttcccctaaccacgcaagagagtgtgtttgcattctcaaaaccactagcctaaactctactcctcctctcaagacttctagtgaaacatcatcgtgacctggagcctatggtttcaattacgttttaaaccatagcttacccaaactatttaaggataattttatatttccatagctattatctcagtaaaggggttaagcatgactcgggaagtacagcatgataccctggtaaaacagaggtaggggaagctaatgtagtgtagagggggcctaagttacataggcttggtggtgtaaataagaacagtagcttaatttctataccacgccctctgcgacggtttgcaggcattagcacctatggaagtatgtactcgtttccctgttgtataggcgaaaaactgacaccagcagttcccacattcactcagccactaagcagtggggcaggaatcaaggctaactgctatgccatccatacacctttctgaaagagttacaaaatcagcacttattatcaaagggccgttgggagcaaggcatttcggcgtatctggaaatgtgtggcgatctgtaaacgctcctgaggagagctggaatcccaagtggaagggaagctggaccgggtgggaactgctccccagcccaagggctgctagaaccccaagactccagccccgagcggcttccggaatccgcgcgtgctggcccggcctcttcgggggcggggcgagcgccgcacatgcgccggggccgggccgggccgggggcgcgcgctctgcgagctggatgtccaggctgcgggcgctgctgggcctcgggctgctggttgcgggctcgcgcgtgccgcggatcaaaagccagaccatcgcctgtcgctcgggacccacctggtggggaccgcagcggctgaactcgggtggccgctgggactcagaggtcatggcgagcacggtggtgaagtacctgaggtaggcacgggtctcgggtggcctgctctgccccggggcggggcctgggacggccgggccacctgcgcgacagagaacacgaggggcgggactcaggccgcgggttttcctcagccaggaggaggcccaggccgtggaccaggagctatttaacgaataccagttcagcgtggaccaacttatggaactggccgggctgagctgtgctacagccatcgccaaggtcagtggcacaactctcgacctttgggagcagccagggaggagtcactgtcccagccccctggcctaggcacaaaggggtgggagagacagctgggccaatatggtctattaccgcctgaaaccccgccgaaccacccttgactctgccttcaggcatatccccccacgtccatgtccaggagcccccctactgtcctggtcatctgtggcccggggaataatggaggagatggtctggtctgtgctcgacacctcaaactctttgtgagtatgtggggaggggctgtgggggaggagggcgtgagggctctgggatctggggttgaattaccactttcttcctagggctacgagccaaccatctattaccccaaaaggcctaacaagcccctcttcactgcattggtgacccagtgtcagaaaatggacatccctttccttggggaaatgcccgcagaggtaggtggctccagttgaatacctccatcctacagtaaccactgcctgtgctctgctcttccttcgtgtttccaggctgagctcattttagtgcctggtacggaaggtgcctaacggatggtattcgaataagtgtgcaagagccttctcctccttcataaagtgtgctccatgagtcccacacaccaccttctctaaagcttccttgccctttcatctccctggtccctccttccactctgtagtcagatcctcttgccctagcatgcagtaaacacatgatctacccctcaggggccggagtggctgccctatctgaaacccttcctgcagatgcatggattaagggatgggaaattgggtaatttttttccttaacccattttacagatgaagatactgaggtgcagagaagtggtttgcttaaagtcactaaattgtatcatggcagagctgaaaccagaatctggctctcctgactcgtctcaggctatctcagcctgtagcctccccagtggtgggcaggcaggcaggcaccgagaacaaaaactgtctggtctcaatttggcctgaatcagtgaccaactcacactttctctaggcctcaggctgccctctgaatgagacacaatacttgtgcctctgagaatggtctgcaggtgcagaggacagccctctccagttaaggctgtttgtgcagctgctggctctgacatccttttcctgctccaccacagcccatgacgattgatgaactgtatgagctggtggtggatgccatctttggcttcagcttcaagggcgatgttcgggaaccgttccacagcatcctgagtgtcctgaagggactcactgtgcccattgccagcatcgacattccctcaggtgctgggatccagaaggtggggtgggggagattggggccctaccctcctgactcttgcccacaccaggtctaaaataattttagtctagaggggcagaacacagctttctggacccccatcagggctggggaacagtgttcagaagtcccctttacatgttggccccatgaagagaccacggcccaagggtacgtggagctcgttggacgagagttcctcaggtgggaactgaggggacttcccactcctctgggactagggtaaactaaggtgtagaaggggacgagacatctggcctcttcctgaacaccaccctcttttcaggatgggacgtggagaagggaaatgctggagggatccagccagacttgctcatatccctcacagcccccaaaaaatctgcaacccagtttaccggtcgctaccattacctggggggtcgttttgtgccacctgctctggagaagaagtaccagctgaacctgccaccctaccctgacaccgagtgtgtctatcgtctgcagtgagggaaggtgggtgggtattcttcccaataaagacttagagcccctctcttccagaactgtggattcctgggagctcctctggcaataaaagtcagtgaatggtggaagtcagagaccaaccctggggattgggtgccatctctctaggggtaacacaaagggcaagaggttgctatggtatttggaaacaatgaaaatggactgttagatgccaagtgagttgtgctgtcctttacacaattcttattcatttgggacacagacagggagctacttctacttatcagtgtagcaagactacaaagaggttaaccgaaggaatttcttcaaaggcctccaaggaatatcttctaatttgtattcaggaccttcccaggctgggaacagagatgccagtcaggatttatctctaggctaggagcgcaagctcatgtttattcattcatttggtagcgctagaaactggcaactgtgggctaaatctagcccatagacctaaatttatgtttttcttaaccttcacaatatttagaaatcagagcacttcacataggtctacattttcagcttcttttagcaggaatgctccttcaaagggtatctgcattcctgttcccacagcccccagcattccttgtcctttagctgcctggcttctctaggcacctgagttcatggtcctgggttagaagctgcagaaaggactgtgctgactccctcaactaaggggtggtactaccgcttgctcctctcagcagctgacgtcccagagatcagtttcctttctgggagggactcctcattgaggggggtgcagaagacctgcagacctgcatcaaccctggtctttgaggcttcaactcctgaaaatcaatcaattgagccctacctttaccagacctttagtctctcttcttctgtttctttttggctttctggacagtgctgactccagctctttccttcttgggatgctgctgcctcttcctcttacctctgctgcttgagccagtgtgtgctctgctctctgcttccctagccccgccatccttctcatcccttacatccaagatgtcctcctcctcttgatgctgctgtcttttcttcttgcttttcctgcttcttccatcactgcatgctctgctctctgcttccctggttccaccacctaaaagtttcctcacctctatcttctaggttcaagtcctcctcctcctgttgctgcctcttctttcttcggctgcatgggtcagcatatgccctgctctctacctcctctgtcctgacactgcctgcagcctccttgccttttcctccttcctccaagacccccatcttctcctcttcatggtgccacctcttctttttcttccctttcctgagggactgattggtttgctctctgctattcaattccccaagcccacttgttcctgcagcgtcctccttctcattccctttagttgtaccctctctttcatctgagacctttccttcttgatgtcgccttttcttcttcttgctttttctgatgttctgctcagcatgttctgggtgcttctcatctgcatcattcctttcagatgctgtagcttcttcctcctctttctgcctccttttctttttcttttttttggggggcttgctctctgactgcagttgaggggccccagggtcctggcctttgagacgagccaggaaggcctgctcctgggcctctaggcgagcaagcttggccttcattgtgatcccaagacgggcagccctgaaacagacagggtccaagtcaaagcgagggtatcgggggaaatgggcctagtccttaagcctgcagggaaagttggtggagggtaggagtggggagctgcctatcttcaggcaatagatgggtaggtaataggaatcatttccctggggtaaaaagaaccaagaggtggcacaggccatggtcaaaggtggggagaaaagggagctcaaggagctgaccactacttacttgtgtgctgttcgcccctcacaggcttggagcagcatctcatcagtcagactgttaggggagatcagcagttacaaacagacctggtggaaaggcttgacctctcctccttctaaaacattccttcaacactgaattcttgttcaggacctggcactttttgaggtactagggatacaaagattagtacaacacagttccacccacccccaagaagcccccagtcaagcattagatttagccctttctcttgccatctgaagacatctcttcccacattccccaagagctaaaatgaagtctcacatctttggggacttggacccctggttgtcgtcatcactgcagctctccaagtctttgtttggcttctctccacctgaagtcaatgtagccatctaggaggggtcatgggggtagataaggccttctcaacaccatcaccatccctattcccttgtggaagccccctaagaatttatagctccaggcagtggtttgccagcccccaccattgctccttgaggagccacagggaggtgtgccatcctgcatactcgaacttggataggagatgggctgctgctgctgggatgtgcagcagctttggcctctctcacccacagctggctggtgagcagaacaagaagaggaaatgctctggttcatcaggtcttcacagtggacaagtgccagtgactgacagtaaagatgccccgctccaccccgaccatagtacctgttcacagtaccttcatttaatcagattaattgagagtctactatgggccaaggagttggggattcagagtggaataagaatgagatgggcccagcccagatggaatctacataggcaattatgatggaagtgttgcctgtgatagaggaagggtactcaactcagacttcagagaatggcttctaaaagtaactgatgtataagctgagctctggaggataagagaaactcagaaggtaaagggggaaagggagaagaatgtcccaagcagagggagcaacatgtgcaataacctgaagatggaagactgtcgtaccttcaaagaaaagaaacagattggaatctgttatgctaatggttaggctaaagtagtggtcctggagaaaagtgaagagatgaggctggagatggcaggaacaggcatgcagagccatataagccagtccgataaatctggattgtgtcatcctaggtcaaacaagacccagtgacatgatgacatttatgttttagagagaacactggatgctttgtggagaagtccatcctccacaaaggttggggtggggagtgagactacaggtgttcttaggaggctgctggagaaagaaattaggcaagagatgatgatggcccgaagtggggtagtagatggtaacagagatgtagagaaatgggaaagatttgctaggtaacatgtatagcccttagcacataatgaccattacatgttagcttcctcctattggtacagtagaaagtggaggcctgaagtcctgggttccagtcctgtttgccattactagccagctgtgggctcttcagcaaaccacttttcacccttttagccacatctgcaaagcagggatggtccagataatctctcaggtctcctctggcttctaagtcctttgaattagatgtcccctggcccccccaaaatttggcagctcctgacttaagagactgtaccctacctcccacgccctattgctgctcccttaacagatggcaggatccacggaacctgaagatctcaattcctgctgagggtctgggcagtctaagtaagcaacagcaaggctggtcacaggatcccactatgttaggaaagttctgagaattgataaggcatacaaggcaactgttcaggccccagggaaaccagggaagagaaaaaggatggactctgttacccacagcctctaataccttcacaaacttctgatacagcaagttgggcttgggatgattataacgggtggtctccttagaaaggctccttatctgtactccatcctgtagagaattatcagtaccagtgaatgggtgacatatcatgactgcctacgccacaggtcccaggccctctgtttcatgtgcccatctatcaagagctcatacctgcccagtttccactaccaagttggccgcagtcttgttgaagagctcattccaccagtggtttgtgaactccttggcagggtcatgtcctacctgccaggggaataaatatgagctctgagtgcctgcctcacctgccctcaagggtcccctctcccacacatgctaaccttcctcagtccacccagtcttaccccatgagtgtcttgcttcagtgtcaccctgagagcctgagtgataccattctccttccggccgaggcctttgcctgcagaggacagtgagcgatttggcttattctcctgcctgctgtgagacctcacaaggcaccccccacacaggcctcttgccattccacacacctgacattggggtatactctgtacctctcagaagacctcctagcgcacttctttctagtaccactccatatagtcccctgcctttgtgtgagcctgaactatctcttccttcaaattcttttggtagagagcccatatctctttttccctcccctagtcctcccaaccaccacttcttcattatccactgtcaaatttcttcctttcttcccttttctgggaaagttagaaattttcttctgcaaatttccctttaaactagcttttcctcctttaattaaatggactacatgggggggtaatccaggatgatggctttcccctgggcagatggtaggcagggagctgggggatgtggaagaggccccatggggatcaccttgagtccatccatgctttagcagctgctcctcagcaaacttcatcccacgactcttgacctctggggtgacattcatggtgagaaaaaagtctctatcctcagactctcaccagagaagaagaggtgatatcatccttttaagaagaaagtagaaagtgcccaaacagccatcagttccatcctgactgcttgttaagaattctctgctagttgggtgcagtggcacacacctgtagtcccagctacatgggaggctgaggcgggattgcttgagtccagcctgggcagtatagcaagaccctctctcataaaaagaataaagcggccaggcacagtggttcacatttgtaatcccagcactttggaaggccaaggtagaagaatcacttgagcccaggagttccagaccagtgtgggcaacgtagtgaaaccctgcctctagaaaaaataaaaaattaaaaagaaagaaaaaagaattctctttcctgagccagagacagaggaaggaggtggcctggtctttggggagctccctatctggctacagaaagagcatatagagaagtcaaggaggaatggtgtcaattctgatacctaagtttatggtgtgctcaccacatgccaggatgtgctaagactttacaaagattatttcatttaatcttcccagcccattcagggaaatattagcctattttacaaatgagtaaagtaaggcctaaaaaggttaagtgacttcaaggtcacacaggtaacatgtagaattcaagcccaggcagcttgtctgcagaatctgtactgtaccactacatagtatctcccaaaatatattaccttgtaaacacaaagctaatgaggtgcttattaacctgagtcataagataatggtactcggtagagaccagatcctgtacttatgcttcagcatttacactgtcctcttggtgtgggggctacacacttctcccacaccactgcagtatttcagtctggctggagttccccttttgaaagtgtccaacttaggaagggcactcctattgagcacttaatgcataacaggtggattacacatattgccacactgtcatattaactcagtcaatcttttttttttttttttttttgagacagggttgctctgtcgcccaggctggatggagtggagtgcagtggcacgatcatggctcattgcagcctcaaacttccaggctcaagcaatcctcccacctcagcctcccaagtagctaggaccacaggcacatgccaccacgcctggctaatttttgtatttttttttgtacagacagggttttgccatgttgcccaggctggtctctaactcctgggctcaagcgatctgcctacctctgctttccaaaatgctgggattacaggcgtgagccactatgtgtgggcttaactcatttaatcttgatagtcctgtgagatagatattattcttattttacaaatgaagaaaacaaggcctgggtttcttgcctaaggttacatggctagtaaatgatggagctggaattacatgatggaggtggaatgagcccaagtcgcctgactccaaagtggtcctctgtctttcttttttttttcttttttgatacggagtctcactctgtcacccagtctggagtacagtggtgcgatcttggctcactgcaacctccacctcccagcttcaagcgattctcctgtctcagcctccgagtagctgggactacaaggctcatgccaccatgcccggctaatttttgtatttttagtagagatagggtttccccatattggccaggggctggtctcgaactcctgacctctggtgatccacctgactcgacctaccaaagtgctgggattacaggcgtgagccaaggcacccggccaaaaactgatgttcttcatcactacactcttcagtctcttacagctctttgtgctttctcctgtaagaccacacacagcctaacccttgtcgcaataattgaaaactacatgccctggaagttaagagaccggctttattccgccactccagagcacgtaacgcggcgccagaactcaagaatacattcagtcgttatttgttgaactgaatggcatagttaggaatggctttaccggattttcagtggataactgggtagaagctgtgcgccccagtctttctgaaacctgtgatcacacttcgggcactgtcccctctacagtcaatctgtgttttcagaagtggccccaggttcactcgtcttacagcagtcctaaagagccggctgccctttccctaggcttccttgctcttgagggctaaattccagccctcctaccccagtgccacttgggtaaaaatactctgctcctctcacgtttgctaataagcccgggctccgactaccaccgttcgggggaagggagccccttaccgtcattgctgggtccgctccgcggaaacatgtgccggacctgacttgtgcgccgccatcttcccggaaatgccgttttgttccttctaggctgtcgaaaccatagagacgtccgcgggaaccaaaatcacggtttttccaggagaaaccattgcggagcccaatttgccggtatggttgccatagaaactgggacctggagcgtgcccattttcggaggttccgaggctgttccacttgcctcatccctgcaatccttgagcagccaagggacttcagtactaactggccctctcaggatgccaagaacggctccgcgtcctacactgagctagtcccgggcgcaaatacgaggaaggaaaactccagggaagcattgagagtagcctgagaaattcgtggaggcagagtaggtgatagctgtgtcctgatttttcagggttgaatactcatgaatactcagccttcacaggaacagttatttatgaaagcctagagactagacatctcaataggttcatcaagcactttttttttttttctgagacagggtctcgctctgttgcccagacttgagggcagtggcgcgatatcgactcactcactgtaacctccgcctcctgggctcaagtgatcctcccatctcagcctcgtgagtatctggtaccacagtcatgcaccgccacgcctggctaatttctgtattttttttgtagagaaggggtcttgccatgttgtacaggctggtctccaatccctggccttaagtgatatgcacacctcggcttcccaaagtgttgggattacaggcgtaagccaccgtgaccggcctcatcaaacactttttgactcaccattgtgtgccagaacttgtccctttggtactgggggataaaaagacgcataagacacaggtcttgatttaggggaacacccagtctagcctgggaaacttgggaccttgagtgggattagatggaggacatgccagtgggacttggagaaagatacaggatgggtgagacgcggtggctcatgcctgtaatcccagcactttgggaggccaagacaggcagatagcttgagcccagaagttcaagaccagcctgggcaaaatggcgagacaccgactaaaaataccaaaaaaaaaaaaaaaaaaaaaaaaaagccgggcatggtggtgcacgcctgtgggtcccagctactgaggtgggaggatcccttcagcccgctgtgggagtgaggggagggcggaggttgcagtgagccagaaaaaaaaaaagcaggatcccagaatgcatgccaggctgaggagtttggacttgccctgtcggtatgaggatgtattgagcaaaggagggaaagaagatacagcaaaagggactgcacatgcccctacccctgcaagctgttccttggcctcactgagccacccaagaactaaaacccgagaaaagtatccttttctgcctccccatatcggtatttccgttgacttagcgccccctagaaacttccaaacagaaaaatcgccatttcacaggagagccttgtcataattgccctgtatgtcatacccattcatccccataattttttccataaaattaattttactttcaaaacatgctacatggggacaatactttaaacgatcgatcttaattactggaattttagacacttgcagaagggatgtgggatgcttcaaaggcattccttagagatggattcaacagagaaacattttgtggagagacatctgactccttttcccattctgccactcattgtgtgaccttgaacaattttttttttttttgagatggggtttccctgtgtttcccaggctggccttggactcctgggctcaaatgatcctcctgcctcagcctcccaagtagctgggagtacgggtgcatgccactgtgccggggcaaacttgagtttcgctgcagtgtcctgcagccactgagaaaattccacagacagggcttcaatttccacccacccccacctctccatctcttctaccccttctatctaaaatatatgtgtgtgtgtattatatacaaaattgtatgttatatagaatatttcatatatgtgtgtatgtatgtacatatacatatacaggtatatatatgaaatatataagaagttttaaaattccgaatgaggtaaccctcaaggaccctttccaacttagagttttagtgtgatgcactttgccagccactcccaaaacttaatggccataaatctttgaatcaagattcctagtctggcctaagtctttgagctcactgttgtgcctgattcactcattcaataaatatttattaaaggtctcctatatactaagggctagaggtataaaaaggtccatctcttgtcctgttaggcctcacgatcttgtgggggtttaaactagttaccaggcatttatatcattgagtaataagagttatggcaaggtcaggacacagtgctatggggataagatgagaagcatctgacccagtctgagacccctgggagcttcttgaagaagtcactgaggctgcagcctgtccctgggggctatgagagatcacaagagaaatgggtctcaaggagttcgcagtttaatggggtctcatacctcctcacaagggtagaaacaaaggccattatgagagaaaaagaatacatgaatacttataaggaaatggcctgaaatgcagataacaagatgcatagaaatatttattacagtaatatttataaaatggaaaaattggaaagaatcaaaatatctcacaacaggagaaagtctacataaattacagtgtaaacatacaatggactaatgtgtagtcttcaacaatgatgttgaagaattcttttttttttctttttttttttgagacagagtctctatcgccaggctggagtgcagtggcacgatcttggttcactgcaacctccacctcctaggttcaagcgattctgcctcagccacctgagtagctgggactacaggtgcgtgccaccacgcccagctaatttttgtattttcagtagagatggggtttcaccatgttggccaggatggtctcgatctcttgacctcatgatctgcctgccttggcctcccaaagtactgggattaaaggcggagccaccgtgcccggccaaagaattcttaatagcttgggtacatgtctgtgatataattgaaatgaaaaaagaagatacaaaatgttacctacagtaagaacctatctatgttaaaaattcataggcaataggatcaaaagtaataaaatacttaggaatacatttaacaaaagatgtgcaagctttatacattgaagctacaaaacctcattgaaagaaattaggaagagctaaataaatggaaagataccctgtgttcatggaatagaagacaatattgttaagatgacaatactctccaaattgatctataaattcaacacaatctctataaaaaatcccagctggcttttttttttttttgcataaatcaacaagtccatcctagaagtcatatagaaatgcaaaggaccagctgggagcagtggctcacacctgtaatcccagcactttgggaggccgaggtgggaggatcatttgaggtcaggagttcgagaccagcctggccaatatggtgaaaccccgtctctactaaaactacaaaaattaaccaggtgtggtagcacgaatctgtaataccagctatttgggaggctgaggcacgaggatcgcttgaacctgggaagtggaggttgcagtgagccgagatcacaccactgcactccagcctgtacgatagggtgagactccgtctgaaaaagaaaaaaaaagagagagaaaagaaaagaatagaaatgtaggccgggcatggtggctcacgcctgtaatcctagcactttgcgaggccgacatggtcagattacctgaggttgggagttcaagaccagcctggctaacatggtgaaaccctgtctctaataaaaaaaaaaaatacaaaaaattagccgggtgcagtgacgtgcacctgtaatcccagctactctggaggctgggcaggagaatctcttgaacccgggaggcagagtttttggtgagctgagatcatgccactgcactccagcctgggctacagagcgagacttggtctcaaaaaaaaaaaaaaaaaaaaaaagcaaagggcccagaatagccataacaatctttaaaaggaagaaagttgtaggacttacacttcctgatttcaaaacttactacaaagctacagactgtggggttttcaaagaggatagacatatagatcaatgtaatggaattgagaatccagaaataaacccatacgcttatgggcaattgattttgcacgagagtgccaaaacagttcaatggagaaagaatagtcttttcaacaaatggtgttggccgggcatggtggctcaagcctataatcccagcattttgggaggccaaggcaggaggatcacttgagctcaggagtttgagactagcctgggcaacatagtgagacatcgtctctactaaaaataaaaattaggctgggcatggtggctcacgcctgtaatcctaacacttcgggaggccaaggtgggtggatcacctgaggtcaggagttcgagaccagcctggccaacatggcgaaatcccgtcttagccagcatggtggcaggcgcctataatcccagctactcaggaggcagaggccagagaatcgcttgaacccgggaggcggaggttgcagtgagccaagactgcgccacttcactccagcctgggcaaaacagcgaaactccatctcaaaaaaaaaattaaaaattaaaattaaaaattaactgaatgtggcggcccacgcccatagtcccagctacttgggaggctgaggtgggagaattgcttggagcctgagctgtggttgtgccactgtgcttcagcttgggtgacagagtgagactctgtctaaaaaaaaaaaaaaaaaaaaaaaaggaaagaatcctgtgaagtcaatttagcatgaagccctccactttttttttttttgacagagtttttctgtgttgctcaggctggagtgcagtggcgtgatcatggctccctgaagcctcaatctcctggactcaagcaatcctctcacctcagcctcccaagtagctggggccacaggagtggcacaccatacctggctaatttttgtattttttgtagagacagggtttcaccatgttgcccagactggcctccaactcctgggctcaagcattcctcctgcctcggcctcccaaagtgctgggattacaggagtgagccaccgcgcccagcctaagcccccttctcttgatacctgatcacccttgatatctgatcaggttcctcatccttcaccatccatcaggtgatatctgattacctcagcctgtctttggcaagaatcttgtaaggttttaatgcaaatcccctttacccctggtgttttttcataataatttcccatctcctaacccccaccctgcacctcagttataaattcctcagttatacttcccatgctgtattgagagttgagcccaatttctctttctcccccactgcaaaatcccattgtcatggtccctatacctatcacaatggtcctgaataaagtctgccttaccatgctttgacaagtgtcatcgaataatttttttctttaacaagatattttcccttcatttaaaattgtctacaattaatgtattattttttcaggaaagtgattttaaaataacaaatggttttgggaggccgaggtgggtgaaagacctgaggtcaggagttcaagaccagcctggccaacatggcaaaaccccatctctactaaaaatacaaaaattagccaggcatggtggcacgcacctgtaatcccagccactcgggaggctgaggcaggggaatcgcttgaactcaggaggtggaggttgtagtgagccgagattgtgacactgcactccagtctgggtgacagagcaagactctgtctcaaaaaaaaaagagaaatggttacaaatgagagcccctgagtgctgagggaggtggggcagaggtgaggtgcatatgactggccccaggggaagaccttcaggaggaagtatgtgtggtccctgagactgactaccaaaccttgaatgcctctctaaattcctggagcagaattgaatcctaaaaattaaggcactgtgttatttttctatactgggtttaaatctacacatagtgttataaaagtcaggccaagccagcatctccccatgattcataaactagtacacaatttatcttcctccacttcttcccagttattttttctgtcagtaaaccctgagactgaggaaagagaaaatatgttgtggttgcaatgagtgtgggatttttaaaaaaaatctatatagcaaatactggcaatgcttacctattcgaatattattcacttttctttctgttgaggaaaaaaaaaaggtgagcctgtgtctcacaggattcaatccttagcctaggcaggttctaattttctgacttcattaaccctttgagttcatgataataaagatattatgatcccttgccaacagtactttactatttaaaataattttcacacggtggtttacagtttagaatatcatgttcacaaacattaccatatttgagtctcactgtaatattgcccagatttgtgcttacctacaaataggggccgacagagcacagagagagatggaatgagacgtgctctcagcactatcactgctgctctctgatgccatctagtgcaggttcagctgaacacttatttctatttaaagccctattgccatctgccccttggtgtcatcattctctccgatctggatgaagccctgtctctgacctgcatccctgtccctctgggtcttgtctctgcctttccctggcctcattgtctcctttaaaaccttcagtgtgtgtaaatgctggtcatggtgtaggtgaaggatgccaagaagggaggcagggtatagcagggcccttttcttttcttttctttcctttctttcttccttcctttccttacttttttttttaaagacagagtcgcactctgtcacccaggctggagtgcagtgacatgatcttagctcactgcaacctccgctacccaggttcaagtgattcttctgcctcagcctcccgagcagctgggattataggtgtctaccaccacacttggctaatttttgtgtttttagtagagacggggtttcaccatcttggccaggctgatcttgaactcttgacctcgtgatccacccgccctctttcttttgcagtgcttgctgcgcttctagagttctcctagagggtgcaggtttcaaggtagcagacacacccatttgggttgcttttttatgtttttcatacgacatatttccagatacatcagtaaagatgctgtggaaaaatttctgaaaggggcagtatagaaaacaccaacaccagtgggagtagagctgggaaggaggaccgtgatggtaagaacaccaaggaatcccagccttattcattctcccttcgaacaagagcttagctgaacacaggaaaaacagaggtctgaagcgctgagtctgaaggatgcccccagagctttgagggctctgctgtagcatctttatctttgagcatcctccaccacggacacctggtgatcccctaaacatgcacaggacctgagccaggtgcagcgcccagaacgctgcaggggccctcagcactggggatacagccttcctgccccacctgctggctctctgccttattacatgttaccatttcaatcatggctaaatatattcatacacatcttatatgaatgtatataaatgccttgaaagattgcaaagacaacaaaagattaaaagtcattttctctatgtggtaggattaagggggcttttcactttttaatgttgttatgtttgttaaattatctacaattaagtgcatcattgtgtaatcagtaaaaaattaatccaagtagtcttccaattaaaaaattattattctatgattcatcctggcattttgatggccttatttttacatttatatttttgagccttctggattttagtttaaggacagttatagatctgctgttttctttttccagataactagttgttgcgacctttagcaacctaaatgtccatcaataggcatctcattaaataaattatgctccatacggacacaaataaaggaacaatagacaccaggcctacttgagggaggagggtgggaggagggtgaggattgaaaacctacctatcaggtactacgcttactacctgggtgacaaaataatctatacaccaaacccccacaacatgcaattttcctatagaacaaacctgcacatgtacccctgaacataaaataaaagttaaaaaacaaatacaggctgggcgcagtggctcacgcctgtaatcccagcactttgggaggtcgaggtgggcggatcatgaggtcaggagatggagaccgtcttgaccaacatggtgaaaccccgtctctactaaaatataaaaaattagctgggtgtggtggcacgtgcctgtaatcccaggtccttgggaggctgaggcagtgaaatcgcttgaacccaggaggtggaggttccaatgagctgaggtcgcaccactgcacttcagcctggtgacagagcaagactccatctcaaaaaaacaaaaacaaacaaacaaataatgctacagccacccactgaaatactatgcagacatgaaaaatgagagaatttgatgtcatgtgctgataggacaaatgctcacatcatattattcggtggaaaagcaaagtaggaggccaggcgcggtggcttacgcctgtaatcccagcactttgggaggccaaggcagacggatcacctgaggccaggagttcaagaccagcttgaccaacatggagaaaccccgtgtctactaaaaatacaaaaaaattagccaggcatggtggcgggagactgtaatcccagctactcgggaggctaaggcaggagaatcgcttgaaccaggaaggcggaggttgcagtgagccgagatcgcgccattgcactccagcctgggcaacaagagcaaaactccgtctcaaaaaaaaaaaagaaaagaaaaaaagaaaagtaggaaacggtttgtatatcatgatctcaggttagaatatatgtatgatgtatgtttccatttatctaccttcctgtagattcttaaatatttttctggaaagatacagcagaaggctaataatggttcagttgttcctgggggcggtgagaagaaagaaagaaaaaaggaaaggaaaattttacttttcattttattcctttgatagtggttgaattatttttcaatatgtaatgatattacttttgtttcataacaaacataaaaatcataagtggaacatgactttcatgtgtgtatggattttatgtcctcttaaaaattaggtggccaaacatggtggctcacacctgtaatcccagcactttgggaggccaaggtgggtgggtcccttgagcctaggagtttgagagcagcctgggcaacctggtgaatccccatctctacagaaaaatacaaaaatcagctaggcatggtggtacacgcctgtaatcctagcgactcaggaggctaaggcgggaggatcagagaggtcgaggctgcagtgagctatgatcgcaccactgccctccagcctgggccagagtgagaccctaaaaaaaaaaaaaaaaggccaggggcagtggctcacgtctgtaatcccagcactttgggaggccgaggcaggcagatcccttgaggtcaggagttcaagaccagcctggccaacatggggaaaccctgtctctactaaaaatacaaaaaatagccaggcgtggtcatgcgcgcctgtaatcccagctacttgggaggctgaggcactagaat

SEQ ID NO: 379 - DNA, 67267 bp, Homo sapiens
agtgtctcacgcctgtaattccagcaccttgagaggccgaggcaggtggatcacaaggtcaagagatcaagactatcctggccaacatggtgaaccctgtctctatgaaaaatacaaaaaaattagctgggcgtggtggtgtgtgcctgtagtcccaactactcgggaggctgaggcagggggatcacttgaacctgggaggcagaggttgcagtgagctgagatcgtgccactgcactccagcctgggcgacagagcgagactccatctcaaaacaaacaaaccaaccttgtgagaaagaccacattaagaggatgaaaagatgagttacagactgtgagaaaatattttcaaaccacgtttgttgaaggactagtagctagaatatataaagaactctcaaaacttgacagtaaaaaaaaatacaattattctgggcacaatggctcatgcctgtaatctcagcactttgggaggctaagggggcaaatcacttgaggccaggagtttgagaccagcctggccaacatggagaaaccctgtctctactaaaaatacaaaaattagccaggcgtggtgacgcacacctgtaatgccagctatttgggtggctgaggcacaagaattgcttgaatctgggaggcggaggttgcagtgagctgagattgtgtcactgcactccaacctgggtgacaaaatgagactccatctcaaaaaaaaaaaaaccatacacacacacaaacagaagacaagcaaaaaacatgaaaacacatttcactaaaaggatatatgagtggcaaataagcttgtgaccaggttcagcatcactagccattacagaaatgcacattaagactatcttgaggtcaggcgcggtggctcaagcctgtaattccagcactttgagaggccgaagcaggtggatcacctgaggtcaggagttcgagaccagcctgactaacatggtgaaatcctgcttctactaaaaatacaaaaattagctgggcatggtggcaggtacctgtaataccaactacttgggaggctgaggcaggagaatcgcttgaacctgggaggtggaggctgcagtgagctgggatcacaccattgcactccagcctgggtgacacagtcagactctgtctcaaaaaaaaaaaaaaaaaaagactgccttgggatattagtatacacctattagaacagctgaaataatatacagcagtggcaatatgaaatgctgggaataatgtattctggagtaactaatctcttatacattgctgatgggaacagcaatagtgcacccactctggaatatagttgggcagtttcttcaaaaagtaaacaattttatgacccagcaactgcattcctagacattgaactcagagaaataaacttatgtctacacaaaagcctgtacattactgaccccaaactggaaacaaccaaaatgtcctctgacatggtgaaacaaaccatggaccccccacgccactctgacatggtgaaacaaaccgtggaccacccacgccactctgacgtggcaaaacaaactgtggaccacccacgccactctgacgtggtgaaacaaaccatggaccacccatgccactctgacgtggtgaaacaaaccgtggaccacccatgccatggacactactcagcaataaaaaggagctgaccactgatgtgtgcaataacttggacgaagctccaaggcattacatccagggaggaaaacatctccgaaggtctacactgcatgaactgtacgatgtgtccacttatgtcacaaaatgacagcattatagagtggtggtggggttcggatgactaaaaaggggtagatggagagagatttttgtggtgatggaactgttctgtattttgtgaccgtggttacgtgaatgtcctcatgtgataaaatgacagaatgaagaaaacactccaccaagctcagtttcctgattttcatattgcactatcctaaggtgtagccaatgggagaaatagggaaaacatttaattagcataagatctagtattccatagcacaggagggtgaatatagttaataataatgtattgtatatttttaaataacaaaaagagtggaactggaatgttcctaacaaagaaatgatacaggcttgaggtgatggataccccagttactgggagttgatcattatacattgtatgtctgtattaaaatatcaaggtactccataaatatatacaccttttatgtacccacagtaatttaaaattttaaaaatttagcaagcaaaatgtgacaaacattaaatttaaatacagttagaaacaatgaatctaatcatatactaagttgatggcacagtgtgggaaaaatgctaatctaagtaaaattcttaacagctttaatacaatttctatgcaataaaatatacccgtgttgtgtgtgcagttcagcgactgtagtaaatgtgcagagctgtgcacccatcactccaacccagtttccggatacttccgttacctcagaaggatccttcttgcattcactccctatcccctccacccagcccgacaaccactcagtcaccttctgtctttatgaatgtgcctcttctggacatttcatagaaatgggatcatatcgtatgtggccttctgtgacgccttttcacttgcatggtgtgtttaaggtccatccacactcagcacgtttcctcgctgcacgatactccagtgtctggatacacccattttgtctgtccatgcatcagctgatggacccactgaggtgccttacgcgagcccagcactattctgcgtgcggggggtccctgctttggtccagtttcatgtttgtgtgtggataccttcagagggcggtaactgatgaaaagaaaataaaactgggtgaagcgttcgagcgagaggggctaccatctgcatggggccgtcattcatatttatcgtagcctactgtctgcaagtactattctaggcactgtcccaaatccctgctcttacagaaggtatattctagtggggaccagacaacaagcatagaaggtgacagaaagagtcaagaaaaggcagaggcaaccctggggaggctcgctgctatttcaggccgatggttgagggaggacttctcaggagaatgtgagccaacaagtaagaaacggagttgctgggcgtggcggcttacgcctggaatcccagcactgtgggaggtagaggcgggcagatcgcttgaactcaggagttcaagaccagcctgggcaacatggtgaaaccctgctctctactaaaaattagctgggtgtggtggtgtgcacctgtagtcccagctactcaggaggctgaggtgggaggatcatctgagcccaggaggtggaggctgcagtgagctgacattgcgccactgccctccagccctgacaacagagcaagacactgtctcaaaaacaaaaaaagaaaaggaaaagaaaaaaaaggaatcatgcaggtactggtgggaacagtgtcccaggagagggaaaggcaaggagaacgagtactcaaaggcacctttgaggaagtaatatttgagctgaacgtgcgtgacaaggaggaccaatgcacgcacagatctgggagaagagcagtgaggtgagggggcaacaatcagagccacaagaagcccctgaagagaagcctggggcactgaggacagccagcaggatgactcctggggttgggcctgagctacagggaggccatgccatcttctgacagtggagagggcaggtctgccgggcgtacgtggtgggcctggggtccccactggaaacagctctctttgacaacatgaatctgggatgtttgaacaccaagtggagccatcaggtcagcagttagagctgagtgtctgccacagagacctagagctacagggtgaaggaacgtgctggggagcaggggagagggtgaagcggatgttgggtgctcagccatgccccacactccacctccaaccacagcacctctgagacagactggacccttcctgaaaacaaaaaccaaacgggatgagtgtgtggggggtagtgagcttcctgtggctgctctaagaagttaccaccaactttgctgcttaaactagatttattctcttgcagttctggagctcggaagtccaaaatgaaggggcaggcagggctggttccttctggtggccctgcagggagatctgttttcttttctgcttcgacagcctgccctcctctcctggctggaggcccttgctccctctgcaaagcacatccctcccacctcttctctgtcaccaagcctcctcttcctgcctttgacttcttgcttgctttttttttttttttttttttgagatagagtctcgctctgtcgcccaggcgggagtgcagtggtgcgatctcggttcactgcaagctccgcctcccgggttcaagccattctcctgcctcagcctcccgagtagctgggactacaggcacccaccaccacgcccggctaattttttggtattttttagtagagacggggtttcaccatgttagccaggatggtctcgatctcctgacctcgtgatccgcccgcctcagcctcccaaagtgctgggagtacaggcgtgagccaccacgcccggcctcttgcttccctcttacaacgactcctactgttgcacagagggcccacaagctaatccaggatcctcccctcatctcaaggtccttaattccaccatatctgcaaagccccttttacggtgcaaggcaacatcatcacaggctcaagtgatcggatacgggtatctgtggtggcgggacggggacatggctcagcccaccacggagtgtcaatggtatccagcatgtggggtttgccaaacaacaacaaacaaaaccacccaatttttataaaaccccgtggcgtgcgagctttgatggcagagtgttacaatatgttcaagccctaaatcccaggacctcagaggtgactgtatctgcagacatggaacacgtcatgaatttgggtgtcatgcctgcacgtgggccatgctaatcttctctatatcgttccagttttagtaggtgtggtctttaaagaggtgattaagataaaatgaggccactggtgtgggccctaatccaataggactggtgtcctcgcaggaagagattagggcacaaacacgcatgaagagaagatgacgtgagaactcaaggagatgctgcccacgagccaaggagacagaccaaagaggaaccggccccgctgacaccctgatctcagagttccaggccccagaactgtgagaaaatactttctgttgtttaagccgcctgttctgcggcgttttgatccagcggcccaagtggacccacattcaaggccagcactgggcagggcgggtctcacaaatgcatgctcccagcacagcgcacggccctcacagtgccaggctcccagcacagcgcacggccctcacagtgataggctcccagcacggcgcacggcactcacagtgccaggctcccagcacggcgcacggcactcacagtgacaggctcccagcacggcgcacggcactcacagtgacaggctcccagcacggcgcacggcactcagagtgccaggctcccagcacggcgcacggcactcacagtgccaggctcccagcacggcgcacggcactcacagtgccaggctcccagcacggcgcacggcactcacagtgccaggctcccagcacggcgcacggcactcacagtgacaggctcccagcacggcgcacggcactcacagtgacaggctcccagcacggcgcacggcactcacagtgccaggctcccagcacggcgcacggccctcacagtgccaggctcccagcacggcgcacggcactcacagtgccaggctcccagcacggcgcacggccctcacagtgacaggctcccagcacggcgcacggccctcacagtgacaggctcccagcacggcgcacggccctcacagtgacaggctcccagcacggcgctcggccctcacagtgacaggctcccagcacggcgcacggcactcacagtgacaggctcccagcagggcgcacggcactcacagtgacaggctcccagcacggcgcacggcactcacagtgacaggctcccagcacggcgcacggcactcacagtgacaggctcccagcacggcgcacggcactcactcctggtctgactggccttcaacattctctcctgagtccattccttccacagacatgcacgaccaagtgtctgctctgtgtgaggaactttaagaccccaccatctagactcaccgcctcagaaggagacaaccgtgaaaagtgagcgacagaggaaggggcgcctgtttgtgccgcgggaaagatttcaagcccaggggacggctcatcagctcatcagaccttcaccgttcagtagccaactggtcagtgatcagtagatgctgccctggggccaaacatttcagacaaataaacaacagtgggcagacaggcaagatccctgctctatttttttgagagggggagacaaacggtaaacagatgtttcctttccgatagtgacaggtgctggggggaaactagactggctggcggggtgggggcagccctgcaggagctgaatgaggagaggctgcagagggaggggctggtacctgaggggctgtttgtgagaattagctggttcggtggagaagcagaggaacacctgaggggctccaggagaagcaggtagggagaagaggttttctgaggggtggaggcaggggtcatacatgctgggccttcaagggccatgatatggttatcattactatgtaataaaccaccccaaatgcagtggcttaaacaactacttatttctcatgattatatgctggctgcctggtgcagcactgtgctggtgtttaacaaccttctcttcagaagaaaacaaaagcaaaattaaaaaccaccctgatttgaagcatttaccaatttccacagtgcaaacactcctcccagggcccattccaaccaggccaactgagctgagtgggtaaggctggaaggggtgccatcccacacaggccacagaagcacacaccctcgggcctgcaggtaacaggcaggtgcggtaaactaactagaaagtagtgcgtcctgagcactcatcacctttgttttcagtgtaactcaattctaagtgtagaggatgcttgaataatggctgtctaccagttaccagcactaggcgtttctggaggtggctcccccgaagatcacccggctccgtcctgctgctggtcagcgcgcggatctgcagggctaggctgtgctctgcatgcggccctccgtcctcagggaggcaagacccggcttctctacacggctgcagccgccctcagaaggcgcaggagctagcgtgcatgccaaaacggagcccacgtggaggcagagggcgggcacggccgcggggacagcgttctggtttccccatcaagccaggctggagggacgatctactttcctaaatcccctccgttctcatgctttccttcccttcccagtgcagggctcccggcaacctagcggccctggcagtgactctggggcctcttcagggagccggctgcagctgcctcagggccagcattgctccactctcccagcctgccagcccgaagctggggggctgtcaccaggaaacccttgctggcggaagccccttccaaactcagctgcctctctgccttggccacacccctggggtgaaggccgtgtggtgctgggagcagcccctggaccccggctctcacacctgggcccgaccactcccatcctgctggccctgaggtcattaagatgacttaaagcagatttaaaacagcctttgtagctggcctagggaggagggttggcctgaatccctcagtctgttttaagccaatctgcccagacttcctggctgcagtcagaagctatgacagaggccatcccagagaggcctcactggggtggacgggttcacctagaacctgaggcccccttccctggcttggagcctgggcagcacacggaggggtgggcagggctgacccccgcttctgaggggcaccagggagcacagagggagccgcagatgaggagtgcgtggggagacggtctgtggggccagcgggcagctgcagccctgccctgggtttgtcccaaggctgggccaaggagccaggaagaagcagtgggatctgcagcagcaccaggctgtcctccagaaagcctgtggacgacccacgcagccaccccacaaggagagcagggctccaaaaccaccacagccggtcagttttgctgggtgggatggctgggtcttgaggacgaggaagtacagaagctcatgaaaagacggaatgagttcacggccacctgcttccataaaacacagctccttaccacacccgaggagtaactgccctgatctccctgcctccataaaacacggctccttaccacgctgggaggataactgccctgctcccaaggcctcctccctcacatcacagccaaacccaagctgttccgactgctccaggtagaaatcctcttcacagtgggccaggagttggacttctctgaaggactaaggaagcaggagtgagtccctaggacacctggagcccagaggctctctgagctgcctgcccttcctggacaggtgcagctggtcctgaggaaagaccagcatcctctacagggcaagtgttcttgtttctactttttggagatgggaaggggaagagtgagtatcaaccgatctctctaagacacagacgcagggtagccccagcccacttcattggcgaatgccagcctcccctctcagcctcgcacctgcacaaactggcaacctcccctctcagcctcgcctctgcacaaactcaggaactcccctctcggcctcacccccgcactaactcaggacctcccctcttggcctcacccctgcacaaacttgcaacctcccctcggcctcacccctgcacaaacttgggacctccccctctcagcctcacccctgcactaaggacctcccctctcagcctcgcctctgcacaaactcaggacctcccctctcggcctcacccccgcactaactcaggacctcccctcttggcctcacccctgcacaaatttgcaacctcccctctcggcctcacccctgcacttagggacctcccctctcagcctcgcctctgcacaaactcaggacctcccctctccctcacccctgcaccaactcaagacttcccttcttggcctcacccctgcacaaacgtgcaaactccccttttggcttcatccatgcacaaacttgggacctcccttctcggcctcacccctgcactaactagggacctcccctctcagcctcgcccctgcacaaactcgggatctcccctctcagcctcgcccctgcactaacttgggacctccctgctcagcctcacccctgcacaaacttgggacctcccccttagcctcgcccctgcactaactcgggacctccctgctcagcctcgcccctgcactaactcagaacctccctgctcagcctcgcccctacacaaactcgggacctcccctcccggcctcacccctgcactaacacgggacctcccctctcagccccacccttgcacaaactcagggtctctgcattgtggcttcttctggtgctcagctgaagacaaagcctccacactggatgaacaggttgtggcttcccagcattggcagaatgaagagacctgagcaggtttcacaggagtcactgagggacagcaggtgacagagtgaccatcactagcagtgaggcactcggagctcactctgcatggggcctgcctccctcgcatggggaagtgaggcagccccagacacgagcccaacacgagagcggaggagcaaacgcggctcatttattagaatatgcaaaagagaggactttcctccacaaatacagattgctgcttctcagtttctatcaagagcaagacaacagttgaaaactgtattcctgagaagaagcaaaaaagttatcagtttacaaacaaggataacaggtgatttcaacaaaagataaaaaacttttttttccaaaaatcaaaatttcaagtattattccagatgacatggcaaagctagcacaggcggaagccaaggtgcccctcaggctctgtagggtcttggaggaagggcccgggcagcatgagggagcggcgcgtcctgggacctgcctccagccctgggcttggggccgtggtcactcacacaagggagcagcacgtcctgggacctgcgtccagccccaggctcggggccgcggtcactcacacaagggagcagcatgtcctgggacctgcgtccagccccaggctcggggccgcggtcactcaccggttagcaaggagcgactaacttggcggccacgtcgagggttagcagttttggacattggaaggtttctttttttaataaacagaagcatatgcttattctttcaaataccatactatacccaattttagtcaatttgtaaattataaattatattatttgtgctacagtttgtgacatttaaatcttattagaagataagcaccaaacctattaaaataaaaaatagataaaatgctgtggttttcccagcagcaggatattgtgtacgtcctgtaggctgtaaacttatgctcccttctcctgaaacaatgtttttgataaacttgcccttctcccttgaaacttttcctaaaaacagacttctgctttaactgtagtttcggaaaatgtacaaaagagcaaaactgcccctctcggcgggacggccgcatgttacagaaaggcttcgtctctgctgctgatgccaccacgagccctgcccagcgctcaccaggagggcgggctgcggcccccggggctctggggagggtctcactcagagggtaaagctccacagaagagtcaccccagagcacctgtcggagaccctgcgtcccttccctcagggggctgtgaaaacaccttgacgtgcttgtctctgtattttaaaaacacgctctcttcacctccagtgctgaaagctgctcagggcctctggatgcttagtttttgaaccttgtctgttcacagatatgattgaatttcctgcagggagaaaatggccaaattacacaagagagcattggagaggcaatcaaataaattacacaacagagcatcagaaaggcattcaaataaacgcattcggaaaccatacacagaaagagctacctgagaaagagtgtgtgtgcttctcacaatatcaaagaaactaacccccaaaggtaaacttctttatccctttaaaaattttgaaacagaagtgcaaacatctggccacgcacagtggctaatgtctgtaatctagcactttgggaggccgaggcgggcggatcacttgaggtcaggagttcgagaccagcctggccaacatggtaaaaccccatctctactaaaaatatttaaaaaattagcctgatgtggtggcgagcacctgtagtccctgctactcgggaggctgaggcaaaagaattgcttgaacctgggaggcagggttgcaatcagctgagatcacacctctatactccagcctggcagacagagcgagactccatctcaaaaaaaaaaaaaaaaaaaagaagtgcaaacatcttagataatttttttagagaagagaataaaagctgcacctcctcaggcatccccgtggcatctgctgacagggctgaggcagacacaccaagctggatggcctgtggccaccttccctctccacagactgtgggcaaggaggaccagcatggctgcacatttctactgaaaactgtctgccagtcaacagtgaaatctctttttgtaacaacatggtctcttccatgtgctgtttgtgctcaaacacaaagcaaggtttttattccacaaaatccctgtgagggaggcgcctttctctgagtccacacaacatctcgtcctgagggcactgtctccatcactttaatctgaactccttgggccacaggagtgatttacgtgatcacctaacctaagagatgcctcctgacctacgcctcccagggcaatgcagatggcgctgtgaacctcctttaaggagcacgggaaagacaccacgtgagggtgacgatgtgacagcaatcacaaatgcctgctcacgggacggacgagaacccagctgtgcagcgctttgcgaggggggcctgaggccctcagtgactgcagccttcgacttagaaacggctaagcctgaaatgatggggtgtgccccggatgcctcagacaacagataaagctactccagccaggaagacacagaagtggaagacggagataaaactgcatgaaacgaagggataaaggaagagcaggatttctaaatgaagataccggttcctaaaggatgcaacctgagagaagcataatgaccatatcagcctatttataagcaggcagttaactcattcatcactctgtagctgacgcctgtgcccccagctgcactcacatggcgtggtgagctttcacctgagtgcggcagttacggccccagtagcagtcaggacgggatgttacggccactggaaaaagagaaggggtacgcatctatgagatgtattgcacgcacccactcagctacctgaatcccagcagagacccaacgacagacgctgcggtggaaacgcacggcctctggtccctccataactagtttcctcggaccgttctgagatttcaggaaaggaaacacatgtttaactaaaaacccaactgagggtcaggtacagtggttcatgcctgtaatcccagcactttgggaggcagaggcaggagaatcgcttgaacctgggagagggaagttgcagtgagccaagatcacaccactgcacttcagcctgggcgacagagtcagactctgtctcaaaaataaataaataaataaaaattaaaaaataaaaacccaattgaggaaataaaattaccccagttgactattggatgtctttacaaatctgttttagaaacccacgttacactcatgagtaactgcaaatagacccagggcctaaaacaaccacagccctgtatggcctgacgtcctgccggctcctgactgaggccaaattctgcttagaacattgagcaaagtgcaaacagggtgtctgtaaagaaaagagtgctggccgagcgtggtggctcatgcctgcaatcctagcactttgggaggccgaggtcaagagttcgagaccagcctggccaacatggtgaaaccccgtctctactaaaacacaaaaaattagccgggcgtggtggcgggtgcctgtaatcccagctactcaggaggctaaggcagaagaattgctcgaactcaggaggcagaggttgcagtgagccgagattgcaccactgcactccagcctgggcaaaaacagcgaaactgtctcaaaaaaaaaaaagagaggcagaagccaagaagccaacccagacagaactagagccatgaggaagtcgggggctccttacctggcaactcggaagcaggaatgttctgccgatactgataggtcagctcacggaagctgcgcaggccacagcagtaacacagaacggtgtctcccgtgactctgtaatctggaagaaacacagccagttacccagcaacaccatcttcccaacagcagcgcacggacttcacagcagtgggagactaacgcactgaccataaatggggtgaagacaacgggcgacacattaggaaaataagaacaaagccaatctagatacgaatttatttttattgagacggagtctcgctctgtcgccctggctggagtgcagtggtgcgatctcggctcactgcaagctccgcctcccgggttcacgccattctcctgcctcagcctcctgagtagctgggactacaggtgcccgccaccacaccgggctaattttttgtatttttagtagagactgggtttcaccgtgttagccaggatggtctcgatctcctgacctcgtgatccacccgcctcggcctcccaaagtgctgggattacaggcgtgagccactgcgcccggccaccaatttattttcttacagcaaaacaatcccacgtggatataacatttattttatttattttttgagaccaagtcttgctctgtcgcccaggctagagtgcagtggcggggtctcagctcactgcaacctccacctcctgcgttcaactgattctcctgtctcagcctcccgagtagctgggactacaggtgtgtgccaccgtgcccggctaatgtttatacttttttagtagagatggggtttcaccatgttggccaggctggtctcaaactcttgtcctcagatgatccgcccgcctcggcttcccaaaatgctgggattacaggcgtgagcctccacgcccggccccacatggatataaaatttaaatattaaaactcccaaaaaacaagaagaaaatgagaaaattagctatttctaagtatgtcttgaaaaccaaattgcacagaggaaaggatttgtacatttggctatctacaatttaaacatcaaaattaaaataaatacaacaaaagtgaactactactatagtggaaacatttgcaacacaaatgaaaatgtgctatacccttaattaacaaagatatcggccaggcacggtggctcgcgcctgtaatcccagcactttgggaggccgaggcaggcggatcacaaggtcaggagttcgagaccagcctaaccaagatggtgaaacctcacctctactaaaaatacaaaaaaaaaattagctgggcatgttggcgggtgcctgtaatcccagctactcaggaggctgaggcaggacaattgttgaacctgggaggcggagcttgcagggagctgagattgtgccattgcactccagcctgggtgacacagcaagattccatctcaaaaaaaaaaataaataaataaataaaaataaaaaaactaagattagccaggcatggtagcacacgcttgtggtcccagctacttgggaggctgaggtgagatgatctcttgagcccaggaggtcgaggctgcagtgagctgtgatcatgcccctgcactccagcctgggcgacagagcaagaacctgtctcatatatatatttctacagcctcccttagtgataaattatcatactccacaaagcatcgtgtgcccccctggagaggagtgaccctcaccaagtgactgacacatcaagcaagagattcaccaagtccccgagggtcccaggacaactgaccccaggacctctggatagacaagtggtagagaccctccaagctggccccacctgttggaggccacacaaatgtttcttatgattaggcataattgaagcctgtcagtaacagtatgaacctgtgatcaatttagcagctgcccagttgttacctcctccttgctcttgttacccaataaatatgaagggctgtagaagctcaggggcagcctttactcactagaagcagggagctctcctcttcttccccatgttgcctttccttaaaagtttcttttgtctttttgttttcatttctacgtttgtccctttgttcagtcctgtaatgatggtctcaagcagtaacagcagtaactgctgtagtgagggtctcaagcagcagtagtggcagtcggccacacccaccctcccctacaaggatagaagctgctggaatatgtcatacaggttcatgcttaactgtctttttttttttttttttgagacggagtctcgctctgtcccccaggctggagtgcagtggcgtgattttggctcactgcaagctccgcctcccgggttcacgccattctccttcctcagcctcccgagtagctgggactacaggcgcccgccaccacgcccggctaattttttgtatttttctttttttagtagagacagggttttaccgtgttagccaggatggtctcaatctcttgacctcatgatccgcccgcctcagcctcccaaagtgctgggattacaggcgtgagccaccacacccggcccacgctcaactttcaaaaaacaacctgaaggccgggcatagtggctcacgcctgtaattccagcactttgggaagctgaggtgggcagatcacctgaagtcagaagttcaagaccaggctggccaacatggggaaaccccatctttactaaaaatacaaaattagctgggtgtggtggcacatgcctgtaatcccagctactcaggaggttgatgcaggagaatcgcttgaacccaggaggccgagggggccttgagctgagatcatgccactgcactccagtctgggcaacaagagcgagactccatctcaaaaaacaaacaaacaaacaaaaacaacctgaaagcatcaggatctttttcctctcttccagggtgggtgaaggtcggagttgtcactgggagagcagacacgcaggcacagccctggacactcacatgcgccttagagcaggaggcaacagaagaactcaccagacagcagaaacactccccgctggagagccacgaggctctcggtcaacatgtttttccatgtcaaacctctggttgccaggtaattctgtgacgcaaaaaaagagaggaataagaaatactcgtttagaggaagaaacactgaaataacgagagaaaacatttcataaaaggcccctgaaagtgtgcaaagccaaagctcagacccttataagtggcatttgcagagggctgcacgttcacggcctgcagcacgagaagtcttgtccaagagcctcctggaagtcccaaaaggttccagtgtaacagttaccagagtctctcaaaagttctgccaagacctacacagcccaggtgtgaatgagacatgaaagccaggccacagtgcacacagcccagcaacgagcccaggctgttgcacaagaaaagctgaggacttggcatctgttctctgtgcccttcaaacacacacgagctgttgagctccttctgtgggcatcaaagcagagtgtggggctgagcgggcgcctgccaggtgtgtctgtggcaagcctcaaggccccaccattgtgtgtgctgtcagcaaagtgctcggcaggagggcgaatgcgcatgttaaacatatgtaaatcctagaaaccgaggtagcttcctagacgtgggaaggcaaatggccagaagagacagggaccagagaaaaggccctggtcttgctaaagggcggcaccttcaagaagccctcaccgagagctgtgggaacaagagctgccgggaacaagagctgcgggaagcggctcctacgaattggtggcaggaggcacaaaaacgaaatacctatttttggaatacggaaaaaacagacaaacaccaatggcatgcagagaaccagctggctgcaccagtgaggaaacatggctcccggctccccaacccgcagcgggtcaggtaaaacagataaacaccaatagaatgcagagaaccagctggctgcactagggagaaaatgtggctcccggctccccagcccgcagcgagtcggtaccttcaggatgtctgactcgtagctgttgttgttcagcacgccgtccagacacttgtcacccaggttgagctctgccgagatgaaggggcaatgttacctgtttataatgatgtcgcaggaaagcactgtctgcccgacactgaggataaacatatttcttttcattacagattctagaaagaataagaagttcaatgataaaactcaattttaaacagaggacaagcagaaatgatttccattccactccctccttaaaaagatcagctctccgagtctccccagcacctggtcttggtatcgtaacagcagaaccccgctgcaaggattctgtcctgggagtatctcccctaataattctgttaaggcttgattttgagctaacacgaatttgacacacctctgcagtccagccaggaataggtatcatttgatgaccaacagtggcctcatccctataaacatcaggctatggaccccaccatcccctgccctcaagttcaccaagagaacatgcaaaggtcaaagcaactggggcctgaagagccagtattaccacaaaacggggccaggcagccgtagcagccggtccgggtgcagccccagtacaggtggcagaaaggctgcaggcagaccgcacctgtggagagaggacactcgttacacgcactcagcgctgagggctgtctccaacacaattcgtcagcaccaggctcaggagctcaactctttctggaaacattgttcaggaggggtctcatggaaatcggggcggggccacatccagctaacgccacccaggttgtgatggactgtgatggcgaggagttgtatccctgaaaaaaggcgaggctcacattttctggtttgttattttttagagatggagtctcgctctgtggcccaggctggagtacaggggaacaatcacagctcactgcaacctccgcctcctgggttcaagggatccacccacctcagcctcctgagtagctaggactacaggtgcacaccaccaggcccggctaatttattttttatttttgtagagacagggtctcaccatgttgcccaggatggtttcaaactcctggcttcaagggatcctcccacctcagcctctcaaagcgctaggattacaggcatgatgcactgcgcccggcctcagacccacatcgtttcttaaactgaacatttacaggcgtgatgcactgcacccggcctcagacccgtatcgtttcttaaactgaacatttacaggcgtgatgcactgcacccggcctcagacccgtatcgtttcttaaactgaacatttacaggcgtgatgcactgcacccggcctcagacccacatcgtttcttaaactgaacaccacatgctcatcccaggaaaacagtgagagacacaaaagaaagaaatctcacctgctccaccaccctaacacggcttcgatgggcttcattctagctctgaacatgcaacatgcttgcccccaactgcacatattcaggtggcttttttttttttttgagacagagtcttgctctgtggcctaggctggagtatagtggagcaatctcggctcactgcaacctccgcctcctgggttcaagcgattctcctgcctcagcctccccagtagctgggattacagatgcccacaactggccaattttttcatttttagtaaagatggggtctcaccgcgttggtcaggctggtctcaaactcctgacctcaggtcatccgcctgccttggcctcccaaagtgctgggattacaggcgtgagcccatgcccagcctaggtggcctttttctacctaggtatttttccatgttgtcaccttggctttgtagacgttatttatttatttatttatttattttagacagagtcttgctctgtcacccaggctggagtgcactggcgccatctcggctcactgcaacctctgcctcccgggttcacgccattctcctgcctcagcctcccaagtagctggaactacaggcgcccgccaccatacacggctaattttttgtaattttagtagagatgggatttcaccatgttagccaggatggtcttgatcttctaacctcgtgatccacccacctcagcctcccaaaggaaattatttttaattgtctgatattctatacaatggaaatccctaaaatataatgttaggtaaaccctcgctaaaattctcacaggattgagtccttaagtcttataacgcctacgaccacttcaccaatgcctctatatacgaagcatgctctgtgaaattagagtgaagagtttggattcctggggaaaagctgggccgagctgccatctgctgaccaccgcgtgtgtgagacatgggacaagctgttctctgtggcttctcacctgccctcccacgtgcagcatcagcagtggccagcgcctgccgtggatgacccccgaggcagcgaccgcccagatcaccgggtgtgtcccacggccatgtgtcccgacgctgcaggctaggccccacccctgccaagcccagtctcagggtacagaccccagcagtaacctgtttggtttcctgagtgcccagaacatttttaagccattccagacagaaccagtgctgtggtcctgtgtgctgctcacacagggctcagtgcacagagcaacaccggtgtgtgcggcaggagccaaccgcggtgctcaacagggctagggctttcttcacctaacactttcacatataagaagctctgacaaattaggaagtcataaaaaaaaggcaaaggacatagacagacatttctgcaggaatacattaaaacagccatgaaataaaggacaagctccatttttaataataactgtatgtgtgtgcatatatatatatatatatatatatatatatatatgttttgttttgagacaggatttccctctgtcgccaaggctggagtacagtggcacgatctcagctcactgcaacctcctcctctcggactcaagccatcctttggcctcagcctcccgagtagctgggattacaggtgtacaccatcatgtctggctaatgtttgtattttttgtagagatggggtttcaccatattgcccaggctggtctgaaactcctggacacagaagatccacctaccttggcctcccaaagtgctgggattacagacgtgagccactgtgcctggccagagttgtatactaaagcatcaacattcatataagaggtttaacagtgacacattataaagcaaccacagtgctggcaggggatagacacagatccaagccgagcccccggtggatggagatgtagcctgtgaaggggcaatgttactagatggtgggaaaagatagattattcaatatggtgacgtggggaaaactgatcacactgatggaaaaaaagaaacggcatccttacttcacaggttaccctaaggccaacaccgctttgaaacctgacccctgaaggacagataggaacccgcctgcgtgcggtggcgcgggcactcacactgctgaggggcgacacgcgggtcctgctcgcgctccgctctccggtcgggcatgggctggaagcagcaggtgcacagggcgtggcttccttgcagagggcacacgtaatcctggactgctgaagcacacgcacattcagccggagcacgtgggacccagggcagaaagacagcaggttagagaggccgccgggaagcacagcgaggagaggtgcacctgagacagccggggaagaagcagacctgccctgctaaaccaccggggaccttctgccacccaaactcggggagtcaaaacagattaacaataaccaaaaatgatctttgatttagcagctggagcaagatttcaaagatctgttgcaagttctctttttttttttgagacagagtctcactctgtcgctcaggctggactgcagtggcgtgatctcggctcactgcaagctccgcctcccgggttcacgccattctcctgctttagcctcccgagtagctgggactacaggtgcctgccacgcctggctaattttttttttttttgtatttttagtagagacagggtttcaccatgttagccaggatggtctcaatctcttgaccttgtgatccgcccgcctcggcctcccaaagtgctgggattacaggcatgagccaccgtgcccggccgatctgttgaaggttttctattatttcctataaagagaggacaagcccatagaacctatgatatagaataaaacaagctgtgtgttcaatttccgctcaggtgagagaacagccatctctcaaataaacaaaggacagccacggtgcacaagaccaatcgatgtggcagcagaagtctgagcccacacagccaagttccctggacactcgccacccacacaggaaagaccctgcgaggtcaacatgccggccataaggacggcaatttcaccacccaggttcactgagcacccactgagggacccaggaccccagagggaggcgctggtcccaccatgcaaaggaaggagcttgtccagtgacccagacagagctgctgagtggcggaagcaaacccaggctggtggatgggcatccataccaacgccaagcactgctttgtccgttccgtccacgggttctacaagaagccactgagaatgcagcacaaggatgtggctctacatccatcccaggccagtggcctcgtgatgtgctcagcccccacccgtggccaggaagccaggacccctgagggcatcttcccattctatgagtctggagtgagcagggcagagaagtgaagcctccataccccctgcccagctctcctctgacttcctggatagcacctggagccccttgctggaaaaaggcacctgacggggaaacatttcgcattaagccaactctggtgacgcagggcagcttctggtgacatcgccactgctggggagaagcccgcctcttacttgagggacagatatgcgatcatcactttgggtctggcaaacccactgggggacatcagctgccctgaggcagtggctggggagaggccaagtattaaggtcagggttgttaattcccaggagtgttcaggaggggctacgaatgaacagttacttatctgatttcccaacccaaaatcagtcacgaaaagcaaccaactgtgagtgcagggagaccaatgaggccagggcccaaagggggcgagcagtgcagacaggaggcgggcagagcgcggccacgtgcacgtcagcaccgggcacagccacaaagtgactcacgcgaaggctgaggcctgagggcggcgcggctcacctgtcgtcaggctgacggacgtggagggtgcatcccccagggcctgtggggctcctggctcgccctcgggtgctgggcagtggggaggctgcgccgcctgccttctgtactcaggacactgccggcacacgacgtatggctggctgcaaggaagcacagggccgagctgtgtgcaggccccaagcctctcaggtagggccggtgcaacgcgggtccgcagccatcacagctcagctccaccgtcgctcagctgcttggtgtgaggggaagggccgggccccattcctgtccagcaccccagtgttagagagggaccagaacgagtcgaagggcaaggacacgccactctgcatccccagctcagcccccacgctttggagccccatccccagggtcactaggtccccactgacgtgtgctcccaggagacgacgccagagcagggcaagggccagcacgtgcgcgcacgccccgtgctcctcaggacccgcctactctcccgttaaaagcagagcgcggtgggcaacgtactgggagccacaccaggcgcctgcaaagccccgaatcacttgtcttttccacacttcccttgtacttccaaaaacgagcagataaaaatgtcaactgtaaaaaaagaacctgtaggaaaaaatacacgaggctctcctctccatttgaaaggcttttctgcgcctcacaccaaggccaggggccaataaggccaacaggtaagacccaaccaggtaaaaaacaaggcacagtgaaaagacatttttttcataaggaaaaaatgtaaatgaaaatgagattacctacttctccttctaaactggcaaaaagaggccctcatgcagaccttgtagagtgcattaggtgcaccctttccgatcggtgtctggataacaaacttatcaaacgtctatcaaggtccaattcccagtcacactctgtgactcgactgcttcacgtctaaacattgacgtcactgcgcatgtgcacaaatacggatggaagaaatgcacagcagcaactgtttcccaattcaaacgctggggacattaccgagctgtacatgcagccgaatcccagcttcataaaaatatttgtttctcatgcctgtaatcccagcactttgggaggctgaggcgggcggatcacgaggtcaggagttcaagaccatcctgactaacacggtgaaacccagtctctaccaaaaatacaaaaaattagccgggcatggtatcgggagcctgtagtcccagctactcgggaggctgaggcaggaaaatggcgtgaactcgggaggcggagcttgcaatgagccaagatccagccactgcactccagcctgggcaacagagcgaaactccatctcaaaaaacaaacaaacaaaaaataaatttgtttctcacgcctataatcccagcactttgggaggccgaggcgggctaatcacctgaggtcaggagttcaagaccagcctggccaacatggtgaaaccctgtctctactaaaaatacaaaattagcggccgggcgcggtggctcacacctataatcccagcactttgagaggccaaggcagacggatcacttgaggtcaggatttcgagaccagtctggccaacatggtgaaactctgtctttactaaaaacacaaaaattagctgggtgtggtggcatatgcccgtaatcccagcccctcgggaggctaacacgggagaatcacttgaacccaggagatgaatgttgcagtgggcgaaggtcatgccactgcactccagcctgggcaacagagcgagactttgtctcgaaaaaaaaaaaaaaagaaaagaaaaaaaaattagccaagtttggtggtgcatgcctgtaatcccagctatttgggaggctgaggcaggagaatcgcttgaacccgggaggcggaggttgcaatgcgccaagattgtgccattggcagggcgcagtggctcatgcctgtaatcccagcactttgggaggtcgaggccggcggatcacgaggtcaggagatcaaggccatcctggccaatgtggtaaaaccccatctctactaaaaatacaaaaaaattagctgggtgtggtggcatgcgcctgtagtcccagctactcgagaggctgaggcaggagaatcgcttgaacccaggaggtggtgatttcagtgagctgagatcgtgtcactgcactccagcctggcagcagagcgacactccatctcaaaaaaaaaagaaaaaaaaaatttgttagtacattacatttcattttgttaacgattatgacacacgtatgaatggctgggtagaggcagcaaaatcttaatgctaaagtggttttggtttccttctttttgcttaacagtcacatgctaaacttggcaaaaggaaataaagataaaagtttcaagtgtttttttttgtcgttcattgtctttttaaatatcatggcctcgacccaacattcagaccccggtcttgtgcattaggaaacctcaacatgtcagcagataaataaggtctctgaggctgggattgtcttggcctggtgatggtgcctcttctgtaataacgtcctgacaaatgataaacattgcaatttatactataggactttatagtcgctagatcaactacaaagaatacatgtgctcatgtgggaaaaaataacatggaatgatgtccctctgtcacagccagagatgccacacccatgacgagtcgaagcaaagggaagggtgtcagccgagggtgcaaatgtctacagcagtcgcctgcggctgacgctctgctggctaccccctggctaccccgctaagtgttcacccagtccctgccacgcctctcaggggaggtgctaatactatccaatatcagaaaacaagctcaagccatttaagagcttggctgctcagggcagaactagatctcaggacccatgctgtccacccagtagtgagctctcggtcacggttgtgatgctcctctggctcacacactctgctctgagccaggggcatgatttacctaatgtctgaggactcactgtcaacgtctgacagctccagcaggtcctctgaactcccttcttcatcagaaaaagaccgcctgactttgggctgcagcatgtcttgagtgattttatttctggcatccatactttgcacatcttcttcactgcgactcttgtctagaattgaaaggacacagcgccattcaccggcagtgagacatggcaggcagacacagctcacactgctgggagctcgcgtgcgcagtgctgcggaaggaggggtctgggcggaccgccctcacgtgcccgggtgctggtggagggactgccctcacgtgcccaggtgctggtgtggatgccctcacgtgcccgggtgctggtggagggaccgccctcacatgcctgggtgctggtgtgtggatgccctcacttgcctgggtgctggtggagggaccgccctcacttgtctgggtgctggtggagggaccaccctcgcttgcccaggtgctggtggagggaccaccctcacgtgcccgggtgctggtgtggatgccctcacgtgcctgggtgctggtggagggaccaccctcacgtgcccgggtgctggtggagggaccaccctcacgtgcccgggtgctggtggagggacagccctcacgtgcccgggtgctggtggagggacagccctcacgtgcccgggtgctgctgggtggatgccctcacgtgcccaggtggtggtggagggaccgccctcacgtgcctgggtgctggtgtggatgccctcacgtgcccgggtgctggtggagggaccaccctcacgtgcccgggtgctggtggagggacagccctcacgtgcccgggtgctgctgggtggatgccctcacgtgcctgggtggtggtggagggaccgccctcacgtgcccgggtgctggtgtggatgccctcacttgcctggatgctggatgaggtatgcttccacgaggttgttgaggatgtggtttttacagatccgctccacgggacagcggcaggtaggacacagggacgagcgctccatccagcccgagtagcaagccgcgcagaacgtgtgcatgcagggctgcaaactgaaagtgcaagaggaacagtgtccagacagtcccacagatgcaaccgcgaccctcgaccaaggtccgcagcagccccaccacggaagggcctacaggggcccagccatcgttcaacctaaaaaccctttaagtcagtcttggttaatgaaaagaaatcagaggccacacggcctctgtgttttcaggaaagacagaggcgagtagattatgacttcaggaacacaaacaacagagacagcaagtgtttctggcccagaagttggaaggttgtcactcttgagttcccgcggaaaagcaaggaggcccttcctcagcggctcctacgttcattctatgcgaaatacaccttcccagataaggagcatttaaaatgtgcagagttcctttcatctgtttgcagagttcacggggtcacacacgacccacacactcaaaacttgtggggtctacagcctccggctctgggttccaggtttcctccttgttggtgccacgagtagaatgaaagtggtagccatgcggggtggctcacgtctgtaatcccaacactttgggaggccaaggtgggcagattacctgagtgcaggagttcgagaccagcctggctaatatggtgaaactcccgtctctactaaaaatacaaaaaaattagccagatgtggtgacgcatgcctgtagtcccagctacttgggaggctgaggcaggagaatcacttgaacctgggaggtggaggttgcagtgagccaagatcacaccactacactccagcctgggtgacagagcgagactctaactccaaaaaacaaaaacaaaaacaaaaaaccaccccgggctacatggcgaaaccgtctctacaaaaaacacaaaaatcagcagggtggctgggagtagtggctcacgcctataatcccagcactttaggaggcaaacgtgggcagatcacctgaagtcaggagttcaagactagcctggccaacatggtgaaaccctgtctctactaaaaaatacaaaaaaattagccgggcatggtggcacacgcctgcagtcccagctgctcaggaagctgaggtaggagaatcgtctgaacccgggaggctgaggttgtagtgagccaagactgtgccactgcactccagcctggtgacagagcgagactccatctaaaaaaaaaaaaaaaaaaaaaaaaaaaaaggaataaaaaatatttagaacattaaaaaaaaaaaaaaagtcagccaggcatagtggtgtgcacctgtagtcccagcaactcagaaggctgaggtcagagaaccgctcaatcctgggagggagaggttgcagtgggctgagaaagctccacccactccacccactccacccacttatctgggtgacagagtaacctcagcagatgccaggccaaacaggacctgcaggcttgtctcatgcccagccctgccccacacgggacgaagaacctgcagtgccatgttccgtgagccaagggtgaacacggtcgcacctcacgcagtcgtgcagcaggtcctggcagatgatgcatgtcagcgtctcctccatcttgtctggcttcccagccgctgctctgacgtcctcgtggacggtttgggcatttctacgcggttgtgcgaccaacaactgcccgttcaggtcaaggtccccatctacaggagaaagggatgtgttctgtcgtaaccaagaaggaaatacacgcaggttcaggtcaaggtccccgtccacaggagaaagggatgtgttctaactgtcgtaaccgagaaggaaatacatgcagtcttttttttttcgagacagagtctcgctctgtcgcccaggctggagtgcagtggcgcgatctcggctcactgcaagctccgcctcccgggttcatgccattctccttcctcagcctcctgagtagctgggactacaggtgcccaccaccacgcccggctaattttgtgtatttttagtagagacagggtttcaccgtgttagccaggatggtctcaatctcctgacctcgtgatccacccgcctcggcctcccaaagtactagggtaacaggtgtgagctaccgcgccccaccctcttctggtgtttttatttttctataatgctcagatgttggtaatcaattaatttttatttttaattaaagaaactgtacacaatttaaaaagccaagtatttagaagaagccaggtgcaatggctcacaactgtaatcccagcactttgggaggctgaggtgggcagatcgcttgagcccaggagttcaagaccagtctgggcaatataatgaaaccccatctctaaaaaaatgggaaaaaaaattagccagctatggtagcgtgcacctgtggtctcagctactcggaaggctgaggtgggaggacagtctgagcccaggaggtggaggctgcagtgagccaagactgcaccacggcgctctggcctaggtgacaaagcaagatcctgtctcttaaaaaaatgtatacataatatatttagaagaaaacaaaggcagtcaccctccgtctcagccgctcctcacccaatttccctcctcggaggaaaactattttcatgtctttgagctgtttcttctggtatttacctctgtgtttctaagttatcatggtacatttgatttatcaattttagacatcattcctgacatctattaaggtagagaaaaactctgtcctgagacacccctgccaacattacattaacagattacattagttcatgatactgtatttgtattattatgcttatgcaagtattcactgctgagccaagtagtttactagattaagttgtgtgacttacacaatttttcatgtttgctagaattaaaatttcctcattcctgtgcttatttttcctgtgtaactgttgctgactctttccacaccttccccacaccgatcaaccccacgtgtcagataacctaatttctttccctggggacccctcctagaaccttcctgtcacagtgccccagtggctggctgctctctggactgctatacagcaatgcttctaccataacattcccaaatgttttctaataatcttaactttggctttcaaagtgcagacttctccctaaatcatcttcaatgtgaagatttaagctacatttttagaaattattgtcctaccaggacagagggctttctttttgattttcttttttttgagatggagttttgttcttgttgccccggctgcagtgcaatggcacagtcttggctcactgcaacctccacctgccgggttcaagcaattctcctgcctcagccttccaagtagctgggattacaggcatgcaccaccacacccagctaatttttgcatttttagtagagacggagtttcaccatgttggccaggctggtcttgaactcctgacctcagatgatccgtccaccttggcctcccaaagtgctgagattataggcgggagccacggtgtcaggcttgatttttatttttagagataaagtcttgctctgtcgcccaggctggtctcgaacgcctgacctcaagtgattctcctgccttggcctcccagtgttaggattacggatatgaactactgcacctggccaggaaggaggattttgagattaattctgcaattcagaatgcactatttccagaccaagagaacagcctgtagcaaatcacagttctatctggattatgcaaaccgcaaaaaaacaggcccaggttttctgaatgaaaatgccggaggtgttacaggcatcaacctgaggcagggtccacatgcccctgcaggaagcaatgccccacagcacggagcatggcagcggcccccgcatgccccaggagcacacgagaggactgaggacacacacaaccagacactaacctcctctcattttcttcttcacgggctccaaatcctcctgatcctggggttccaacgacgaaaaggacgcagtctttctgtctgggagagctgaggcaaagctggagacttcatcacttgccacagagggaccacttcctttaggggagatgccaccacccccagaccctgtgagaggaatcaaacaagataggtgctgatccatccagctcaggagagaaccatgcctgtaaggtgtcactgactggagcccagtgcagctggcagcctgagatgtcgtagtttaggaatgacaagtggcttacgaggagtgtgtgctcactcaactcacatcttaactctatttgtgcctatctctacgtggggtggagctgggggcaaggagcccatttgcagagaaacaaatgcggagatgtctgtgaccaggcttagccctcgagcaccgagtctaacgcagggcaaacccacatacccgtggtcatatgatacacactgtgtcataaacttgttacaacagagctttgggccgggtgcggtggctcacacccgtaatcccagcacgttgggaggccgaagcaagtggatcacctgaggtcaggaggtcgagaccagcctggccaacatggtgaaaccccatctctactaaaaatacaaaaaaattagacaggcgtggtggcgagtgcatgtagtcccagctactcaagaggctgaggcagaaaaattgcttgaacccgggaggcggaggttgcagtgagccaagatcgtgccactgcactccagcctgggcaacaagagcgaaactccctctggggaaaaaaaaataaaaataaaaaatagaggtctgaggctgggcatggggctcacacctgtaatcacaatactttgggaggccaaggtgggaggatcacttgatcccaggagttttagaccagcctgggcaacacagcaaggcaccatctctacaaaaaatacaaaaaagaaaaaaaaattaactaggcgtgacagtacgagcatatggtcccagctactcaggaggctgaggtgagtggatcacttgagcccgggagttcgaggctacagtgagccatgaccacatcactctcccaacctgcacaacagagcaagacctcatttttttttttgagacggactcttgctctgttgcccaggctggagtgcagtggctcactgcaagctccgcctcctgggttgacgccattctcctgcctcagcctcccaagtagctgggactacaggcacccgccaccatacccagctaatttttttgtatttttagtagagacagggtttcaccgtgttagccaggatggtctcgatctcctgacctcatgatccacctgcctcagcctcccaaagtgctgggattaaaggcatgagccactgtgcctggccaagacctcatttcttttgttttctttttcttttttgagacagagtctcactctgtcacccaggctggagtgcagtggcgtgatcttggctcactgcaagctctgcctccctggttcacgccattctcctgcctcagcctcctgagtagctgggactacaggtgcccgccaccacgcccggctaattttttgtatttttagtagagacagggtttcaccgtgttagccaggatggtctcgatctcctgacctcgtgatccacccacctcggcctcccaaagtgctgggattacaggcgtgagccaccgcgcccggcctgacctcatttcttaaaaaaaaaaaaaaaatgccaggcgcggtggctcatgcctgtaatcccagaacttcaggaggccaaggtgggtggatcatctgaggtcaggagttcgagaccagcctgaccaacacagtgaaaccccatttctactaaaaatacaaaattggccgggtgtggtggcacatgcctgtaacccagctacttgggaggctgaggcaggagaactgcttgaacccaggaggcggagttgcagcgaacgaagttcgcgccattgcactccagcctgggcagtaagatcaaaattccgtctcaaaaaaacaaagtaaaacaaaacaaacaaacaaaaaaaaacagaagtctgtgtaaagcacagatgctccagtggagggatgcatagcttccaacgggtggagatggtgctgcgtgtgaactattttacaagaggtgtgataacgggaaggatacagcacagtgacttgtagggagagcgctatctccacgagcaagaagccagagtcataacgacaggaatgaccttggcagaaaaacaggcagactttctaatcacctctatcttttttttgagacagggtctcactcttcacccaggctggaatgcagtggcgagatcttcattcactgcaacctctgcctcctgggctaaagcgatccttccacctctgcctcctgagtatctgggactacaggtgtgcaccaccatgcccagctaaattgttttttgtatttttggtagagacagggtcttgccattttacccaggctggtctcaaactcttgagcccaaacaatccacccacctcggcctccccaagtgctggaattacaggtgtgaataaggattacaggtgtgaataaggattacaggtgtgaataacctatatcttaataaagacttagtttatcatattacagcataatacatatctagcttacagtattcaaatgtaagtgttattatttgaaaaaaaaaaacacaagaaactggcttacagcagctgaaagaaaacagaatagttttggggacaaaccacctcatatacgaacagaaggaaagagacagcctgtgggccggcccccagccggcacccactcacgccatcatctccagcgccccgtgctcagccaacgtggagaggagcaccatcttaccacttacagaatgtacctggcacactgcctcacatttagtagctgctcaataagcagtaactatacttattttgttagtatgcatacacttaggcatacagatagaagaatttttattttttattatttttattttctttttgagacagagtcttgtgctgtcacccaggctggagtgcagtggcaggatattggctcactgcaacctccacctcctgggttcaagagattctcatgcctcagcctcccgagtagctgggattacaggcgcccgcaaccacacttggctaatttttatatttttagtagagatggggttttgccatgttggccaggctggtcttgaactcccgacctcaggcgatccaaccacccggcctcccaaagtgctgggattacaggcgtaagccaccacacccggccagaagaattttttttttaattacataagtaatatataaatacgctgccctttttaagtagaacattatcaaaaaattatgcaaaccgtattacccagactacacactgtgctatgcacattggtggataggaacaggaaacaattttactggtgaagtttgttttctttacaggccagagctattttgtgtttgatttctgaagagggtctagtagccacaaaatgcacatgggacttggccctagggacatggtatagttcatctaggcagacagttcaaaatctgcagtcaatccaaaatactagtaaccccgcgtcctgtctgtgcttgctgcacttgaaacgctgtgggccacgctggagcggccggaacgccacctctattcctctggggctgtccctgcacggggagagtcagtgcatgctggatctagctgtgaagagccagtgcacatcccagctgtgcccaagggtaggttttaaggaacctggaagatacgatgaagggtacacagcccaagagagctggtaaaacttcagcattcaggtggctattcaaatctggcatgttttcttttctttttttttttgagacctggtctgtcgcccaggctggagtgcagtgacgcggtatcggctcactgcaacctccgcctcccagcctcaggtgatcctcctctctcaggtgaaactcctgtctcagcttcctgagtagctgggactacaggcgcctgccaccatgcctggataatttttgtattttcagtagagacggggtttcaccatgttggccaggtaggtctcaagctcctgacctcaagtgattcgcctgtcttggcttcccaaagtgctgggattacaggtcttttttttttttttttttttttttgagatgggctctggctttgttgccaaggctggagtgcagtggtgcaatctcagcacattgtaacctctgcctcccaggctcaggcaatcctccctcctcagccttccaagtagctgggattacaggcatgcaccaccacacccggctaatttttgtattttttatattgtattttttgtaaagatacggtttcaccatgttgcccaaactggtcttgaactcctgggctcaagggatctgcccaccttagcctcccaaagtgctgggattacaggcgtgagccactgtgcccagtgctgagatgctttcatcttgaagtgttattttctttcactcataaatttaaggttatgatgttaaaacaaaggtaaatcaaagaggctctgagaagccggggttgtgtttagtctacaggagacaggctagtagaaacttgtctgtcatgggtttggtctccgctgttcctcttatctccagaaatatcaggtggaaactacatagcactcactctccacagtcttgcctgcaacttagtgtccccaattagcacctgagaagtcctcccaggtgagtcccgaaatcacatcagaatgttacaacacaccagaatgtgacaacacaccggaatgttaacacaccggaatgttacaacacaccaaatgttacaacacactggaatgttacaacacaccaacacaccggaatgttggaatgttacaacagaccggaacaccacaccggaatgttacaacacaccctggaacgttacaacacaccgggaatgttacaacacaccagaatgttacaacacagcatgtaacaccaaatgttacaacacactggaatgttacaacacaccggatgttacaacacaccgcgattgttacaacacaccagaatgttacaacacaccagaaagttacaacacaccagaaagttacaacacaccgcgtaacaccaaatgttacaacacaccggaatgttacaacacaccagaatgttacaggaatgttacaacacaccagaatgttacaacacattggaatgttacaggaatgttacaacacactggaatgttacaacacatctggatgttactcttcagatggctgggatgtcatccatcagactgaggtatgcttttagaacactctgctcctggtgaccagcctggccaacaacgtctctactaaaaatacaaaaattttctgggcgtggtggtggtgcgcgcctgtgaccccagctactcaggaggctgaggcaggggaatcacttgaacccgggaggcggaggttgcagtgagccgagattgcgccactgcactccagcctgggcaacagagcaagactctgtctcaaaaaaacagaaaataaagagcactctgctgctgaggagctgggctcatccaaaggagcctctgaagaaggaaggagcggatgcaacaaggcctcaagaacatcaacgaacaggagaggtgtggctgcccgtgtgaagacagagcaacggcatacaacggagtaaaaaccacatcaacagaagtggaaacaggcccagagagcgtgagaggtttctggtttcaagaaggcacactgagtccctgcacccgatgccgctccttccccaaatcccactggaatacacagagagacataaaaacaaggagtgtcctgtagcagagcagccaggctggctcatgagacagagggagcagtcttctgggagacatggctcttgctgctgcggatcagccaacagatccatggaaagcaaaggtcccttctccggaggcttcctggtgcctgccatgaatgtgtcagtgatgttcagagctctggcagccactgtgaaacctcgaggcaaaaacctgagcaaaaacagcagcgtggagtgcacagaaggccctggtgacctcaggagtagctgagctgagcgggcatttctggactttttatcagggaaccagctttcctgtcagatcgaaacacagcctaatctgagattcagaggctcttctgttcataggaatctgcagactgctatggaatgtaagaacgcgagagccaagcactccaggactaagaatgagcccagacgacacgaagaaagccgtgagacttcactgaagaacaggaagagcttaacaaacaaggagaaacaccattttcctgggctctgtaaaactgtcaattctccccaaatcaaaaatctcaaaaagatttttctattaaactggaaaagctaattcaaaacataatctagaatagagaatagctaagaaaattaaaaaaaaataatatgtatagcgcgatccaatttagagaatccatatgtacacatcctccacgtgacaaaccctaaaagaaaacagaaaacattcccgtcacgctgcacccagatggaatttcttcccaatgaccatggaagaggtaagagtcatgccgtaaggaacagcatctgcaaaactagttttaaataacatcctcttctggatgaactctgaaaacaccacgctaagtgaaagagcccagtcacggctgggcgcggcagctcacgcctgtaatcctagcactttgggaggccgatcggacagatcacgaggtcaggagatcgagaccatcctggctaacacggtgaaactccgtctctactaaaaatacaaaaaattagccaggcgtggtgacgggtgcctgtagtcccagctactcagaggctgaggcaggaaaatggcgtggacccaggagaatggcgtgggaggcggagcttgcagtgagccgagatcgcgccaccgcactccagcctgggtgacagagcgagactccatctcaaaacaaacaaacaaaaaacaaaaaaaaattagctgggcgtggttgcaggcacctgtagtcccagctactcgggaggctgaggcaggagaatggcgtgaacctgggaggcggagcttgcagtgagccgagatcgcaccactgcactccagcctgagcgacagagcgagactccgtctcaacaacaacaaaaaagagcacgcatgattccatgtctgtgaagtgtctagaacagaaaaatccagaggccgaaagcacacgcagctgccaggggctggggggaggggacatggggagtgactgctgatggggccgaggggaaggggacatggggagtgactgctggtggggccgaggggaaggggacatggggagtgactgctggtggggccgaggggaaggggacatggggagtgactgctggtggggccgaggggaaggggacatggggagtgattgctggtggggccgaggggaaggggacatgcggagtgactgctgctggggctgaggggaaggggacatgcggagtgactgctgctggggtcgaggggaaggggacatggggagtgactgctggtggggccgaggggaaggggacatggggagtgactgctggtggggccgaggggaaggggacatggggagtgactgctggtggggccgaggggaaggggacatggggagtgactgctggtggggccgaggggaaggggacatggggagtgactgctggtggggccgaggggaaggggacatgtggagtcactgctggtgggcaccggtttccttttcgtgtcaatgagtggtgatggtcccacaccttgtgatgtactaaaatccactgaaatgtacacttcggctggatgacttttatggtatgcgaattatagtctcaatgaaactgcaaaatacacaatggtactagagtccctgatcttcacttctcttgggaagtgaagggaacaacacactcaatattgactcctacagaaatctcactactgagaacctcatgccagtcctcagtcgcttatctgcctctgtaacaacacaggtaaagagtagtgaacaaaaaccatgcaaccagcaccaagacctcatgagatgtgacctcaccacaactggaggaacgctctcgccctgcaggagaaggctccgtggaagaggccgaggctgtggggaagaggtctgacgtcgatgttgatggctgtggttcctcaaagcacacctgagtggcgggcgacgacggagggacccggggatcggcccctcgccctgcacctgcacctgaggtatctttggtcccatggaacacattttccttgttagcttctgtaacccaaaaggagcagaagcagcacacaaccagggctcaagcagacactctagggattgaaatgctcttaagaatgcaacagccccaaggccaggcacggtggtgcaggcctgtaatcccagcactttgggaagtcgaggcaggtgtatctcctgaggtcaggagttcgagaccagcctgaccaacatggtgaaaccccgtctctactaaaaatataaaaattagccaggcgtgccgggcgcggtggctcatacctgtaatcccagcactttgggaggctgaggcgggtagatcacgaggtcaggagatcgaggccaacctggctaacacggtgaaaccccatctctactaaaaatacaaaaaattagctgggcatggtagcgactgcctgtagtcccagctactcgggaggctgaggcaggagaatggcatgaacccgggaggtggaggttgcagtgagccgagatcgcgccactgcactccagcctgggcgacaaagcgcgactccatctcaaaaaacaaacaaacaaacaaacaaacaaaattagccaggcgtgacggtgcaacctgtaatcccagctactcgggaggctgaggcaggagaatctctcgaacccggcaggaggaggctgcagtgagccgagatcgcgccactgcactccaggctgagcaacaagagcaaaactccgtctcaaaaaaaaaaaaaaaaaaaatgggagactgaagcaggggaattgcttgaacccaggaggcggaggctgcagtgagctgagatcgcgccaccgcactccagcctgggtaacagagcgagactccatctcaaaacacaaaaggaatgctatagctcctaacatgcacccacttctttgctacactcttacttaccaaaggattcttgtgtcatgccttgcttttcacttaaagattcatagaggtatgccacgtctaaaagaaaatcaatcaaatcagaaaagtggtggcccctgtgcaaactgagaactcatttttctcttctgttctccagtccatttgtttttgttgattattttgactcatcagctaataacaaattcatcagtttaagagatttcaaaacaagtaatctaaaacatctctaccaacacaaaagaaataagcctcgggaaaaaatggcatcaggaggcagaagaaggtgaagaatctatgcctcacttataatttcaaactacacaaaggagcagatacaagatccttccgtgtggccaggggctggttaagtttatgctgaagatgcctaagacatatttgccccattctccctcaccactgtggtctttaggtatttcaggggtggccaggtgcagtggctcttgcctgtaatcccagcactctgggaggccgaggcgggcggattacctgaggtcccaagttcgagaccagcctggccaacacggcgaaaccctgtctgtactaaaaatacaaaaattagccgggtgtggtggtgtgcacctgtaatcccagctacctggaaggctgaggcaggagaatcgcttgaaaccaggaggtggaggttgcagtgagctgagatcacgccattgcactccagcctccgcaacagagcagagcgagactctgtctcttatttatttaaaaaattaaataaataagtattggccaggtgcagtggctcatgcctgtaatcccagcactttgggaggttgaggtgggtggatcacctgaggtcgggagtttgagaccagcctgtccagcatggcaaaaccccgtctctactaaaaatacaaaaatgagccgggcgtggtggtgggcacctataatcccagctactcaggaggctgaggcaggagaattgcttgaacccggcaggtggagattgcggtgagctgagattgcgccattacacttcagcctgggcaacaagagcgaaactctatctcaaaaaaaaaaaagtatttcaggggtgaccttcgaaggactcccataactttccttgtcctatactgttcttccacaaaacaaaaacgggacttctggagctgaaaaaacttactggaatccagtctaacctttgatgtttcttgtaaggtctccaaaagcagaaccatcaatggcctccagacccctggtcctaggttttattccccataactcaagttcttctcctgtagaacccaaaccatccccatcagtttctccttggctgccattttgggattggctgctcatggccacagtggtattcctgaggaatggctgggctcaggctgcaaagtcgacactcccactcaacagacactattcacggcaggaacccatgtgagcaagaaatggggtgtagccaggaggaacgttcctatgggaagggatgtagccaggaggaacgttcagagagcgccctcacgtgcacccccgtgcgggtctgaccccggcaagccttcctctctcttactgtgttccggttcattcttcctgtacaccaagtagatgacatccccagtctgtaaagggcatgtctgcttcttaacaaccttcagcttgttaatcactgttccactggtgctgtaaaaaaacaaaaacacaatttattctacttaaaataacttggagttacaagattttttttctagcaccattagcaagcagctcgatatgaccactctggaaatactcataggaacagtgtaaatacgtaacgatgcacacatccacgcacccctcaccattctctcaagaaatggctcgcccacttctccctgactgacagcctaaccagccactacacctcctcacgtgcttggcagctctgctgctgcagggctgggttctctccccgtttgcctcctagtggacccggaggcctcgtctacagtgtggtgcttccacctccagcctcccctgagctggacttgtgctatccacagttctgttccttgcagccatcacaaccccggtgaactcatgcctccaatgagtactgatccctcccaagagactggctctgggcagaagcggactaaatgctgggccgtcagctgcaggacatggccctgcactcagagcttgtggtctggctgccaagccccttgaggtactctgcccagggagaggccaatgcagatgctgctgacccagggacagacaggaggaggctaagttgatggggcaggaagtgcctcctggggacttctgagcagagacctgacagcaaatcaggtgttggtcaggtgaccaagatccaagagcacagcatacccgacacacaaaacggcaaccgggcaaaacgactgaaaccacacaggcctcagctctgcagcttcactcccgaggccccagcagtggacagaactcacatccgagtgaccaccacggtttgctgagggatgggagtggcaaacgatttccataaacagagggtaaacagtgtaggttttgtggtcaccattgccactactcagctctgccgtctgtagcaggaaagcaaatgcagacagtaagcaaatgaactgccacagccgtctccccgtaaaacctccgaaaccaggcagtggctgtgtgtgtctgagttctgctgttacaacacaaagctgaccctggaagatgcggttttgagctgtgcagatgcacttatacacgggtttttttcaatgagagggaatgaatcccacacatatgctggactgactttctgtgtcctcctgctccacagggctggctacggggctggagtgcacacggacttgggtgcatgcaggggcgctggagctggactgactttctgtgtcctcctgctccacagggctggctacggggctggagtgcacacggacttgggtgcatgcaggggcgctggagctggactgactttctgtgtcctcctgctccacagggctggctacggggctagagtgtgcacggacttgggtgcatgcagggggctggagccaatccccccagatgccgaggggcgactgcagccatcactcatcctcctgttctttccaaacaaaaatctgattatttcactcctccgcttacacccctttgatgactcctcactgctctcaggctaaagcccaagctcccttgtgtgactttgccgctcaccacacgctccgaccacacagccctgcttatgctcaggggcccctacacacgtggttccttctgcctgagcacccctcccctccagcccacctctgccaaggaacgtggcacctctggaacctggaaaaggcagagaacaaattctcccctggagcctccagaagaaaccagccctgttcagacctggattttagccccatcagacccatatcggactctggacctccataactatagtaagacagcaaatttgtgttttttaaatccattaagcttgtggtaaattacaatagccataagaaagtaccaccaccatgcagtcagcacagggatgccatgccctgaagcaggcgggacggcccaggaccagcacccagcgtggggaagccaggccctggaacaggcagggaggcccaggaccagcattcagcgcaaggaagccaggccctggaacaggtagaaaggcccaggaccagcacccagcgcggggaagccaggtcctgatgtaggcgggaaggcccaggaccagcacccagcacagggaaaccaggccctggaacaggtgggaaggcccaggaccagcacccagcgcggggaagccaggccccggaacaggcgggactgcccaggaccagcacccagcgtgggaaagccaggccccagaacaggcgggactgcccaggaccagcacccagcgcggggaagccaggccccggaacaggcgggactgcccgggaccagcacccagcgcgaggaagccaggccccggaacaggcaggaaggcccgggaccagcacccagcgcggggaagccaggccctggaacaggcgggactacccaggaccagcacccagcgtggggaagccaggccctggaacaggcgggactgcccaggaccagcacccagtgcagggaacccaggccctggaacaggcgggactgcccaggaccagcacccagcgcggggaagccaggccctgatgtaggcgggaaagcccaggaccagcacccagcacggggaagccaggccctgatgtaggcgggaaagcccaggaccagcacccagcgtggagaagccaggccctgatgtaggcaggaaagcccaggaccagcacccagcatggggaagccaggccctgaagcaggcgggacagctagggaccagcaccctgcctttcccattgtgccaagaaatagagaacttaatctgatatctattagactaggaaacggagcatcagttcttcctattaaaacctacttcctagtcttctatccctgaaactatcagttaccaaagaatctcacagagcctgatctttaccaaacaaaaaaaatcctgcagtgagaacagcacactctcaacatactgctagaagaccacctgccacttgcagcagatttaaaagacgcacattctggccgggtgtgggggctcacacttgcaatcccagcacttggggaggctgaggcaggtggatcacctgaggccaggagttcaagtccagcctggctagcattgtgaaaccccatctgagctaggcgtggcggcgggcacctgtaatcccagctactcgggaggctgaggcaggagaatcgcttgaacccgggtggcggaggttgcagtgagccgagatcgcaccaacagcacttcagcctgagccacagagcgagactccgtctcaaaaaagagaaaaaaaggaataggcacattctgagtaacactgacacagacttcccttccgagaaatcatcccaagaaaacagacatgaaggcagagtttgggaaagagtcactgcagtgttatttatagtaagaaaaagtcaaaacaataaatgtccaccaataagggaagtgacaaagaaactatcctaagataatgaaaagatgagctggatgtagatgcagtgacatgtgaagcgctccataaaacaccgtaagtgaaaaaagctggccgggcgcgatggctcacgcctgtaatcccagcactttgggaggctgaggcaggcagatcacctgagatcaggagttcgagaccagcctggccagcatggtgaaatcccgtctctactaaaaacacaaaaaaatagccgggcttggtagtgtgtgcctacaatgccagctactcgggaggctggggcaggagaatggctggaacctgggagtcggaggtcgcagtgagccgagatcgtaccactgcacttcagcctgcaacacagtgaaactccatctcaaaaaaaaaaaagaaagaaagaaaaaagctgacgctacaacagtatgtgtagtgtgattgcatttatgcaaaatatatataccaacatatgcatttttaacgtatgaataggattttggaaagctttccactttccaagttgaatatccctaagctgaatgtccctaatcagaaatgtgaaatccaaaactttttgagcaccaacaagacactcaaaaaaatactcactggaacatttcagaattttgattcagacatgctcaactggtaagtataatgaaaatattctaaaatctgaaacaatccaaaatctaaacagtctagtttcaatcatttcagatactcaatctgtacttcagttgtacaagaacgagaatttattagttttaaaaaatgattttttgatttgagggaaagaaatcaaacttgaataggcttgcaagaaccaaaaattaccagcatcttttaagtcttatttctgagacatacttaatttgaatacattcaagaagggtcatagacaccaaagtgtcactaagtgtcccatcctggaaaccaggaaatacatcttctaataccttgggagcctaattaactacagtcatgccccagataataaacttttgtttcgttttgttttgagatggagtttcactcgtttcccaggctggagtgcagtggtgccatctcagctcaccacaatctccgactcccgggttcaagtgattctcctgtctcagcctcccgagtagctgggattacaggcgcatgccacaacgcccggctaatttttatatttttaagagagacagggtttctccatgttggccaggctgggcttgagctcctgacctcaggtgatccaactgcctcagcctcccaaagtgctgggattacaggtgtgagccaccgcgcccgggctgataataatgtttttttcaacagacgcatatacgataggagtcccacaagattaaaatatcatatttttactgcacctgttctgtgtttagataaatactcttaccattgtgttacaactgcctatagcattcagtacagtagcacgctgtataggttgatagcctaggagcaatcggctataccatatagcctaggtatgtagtaggctacaccatctaggtttgtttaagtatactccatgatgtttgcaagatgatcaaattgtctgacacatttctcagactggatccctgttgctaagggacacatgactgtgctgttataaaaatgagccgctgttatcacactaaagacagcatttcttctcctcctcagccgtggcacacagcacagagcacgaagtcaggcttcttaagctacaagaagaaacaccaaaagaagctcagaacatactcacctggtatcttccagtgtcacctgacctgatttttcatccactacaattctacagtgatctccagagaccagtttattgctggggaaggaaaggtcgcaacctaaaaaagagagggtgggtcaacacgggatatgatcgtggtaactgtgaacactactgcactttgtttaccaaagtatgtggttccaactcaggatccccattgtacatatgtaaaaaaaaacacttgaccaagaaagacataaagaaatttttttttttttcttgagacggagtctcgctctgtcgcccaggctggagtgcagtggcaccatctcggctcactgcaagctccgcctcccaggttcacaccattctcctgcctcagcctccagagtagctgggactgcaggcgcccgccatcacgcctggctaattttttgtgtttttagtagagacggggtttcaccatgttagccaggatggtctcgatcttttgacctcatgatctgcccaccttggcctcccaaagtgctgagattacaggcgtgagccaccgcgcccggcccatcctgaacctttctgaatccccaccctctcaaagacacccatcaatacctccagttacacacagcctcttaaatggcaattttacagccaggcgcagtggctcatacttgtaaacccagcactttgagaagctgaggtgaatggatcacgaggtcaggagttcgagaccagcctggccaacacagtgaaaccccatatctactaaaaatacaaaaattagctgggcatggtggcggttgcctataatcccagctacttgggaggctgaggcaggagaatcgcatgaacccaggaggcagaggttgcagtgagctgagatcgcgccactgcactccagccttggcgacagagctagactccaactggaaataaaaaaaaaaaaaagcaattttacaatatgcttgcatacacagctaacctgatgagtattattagaactttaaaaaaactcagggggttggctaggtccggtggctcacaccgaggcgggcagatcacaaggtcaggagatcgagaccatcctggctaacacagtgaaaccccatctctactaaaaatacaaaaaattagccgggcgtggtggcgggcgccttgtaatcccagctactcaggaggatgaggcaggagaatggcgagaacccgggaggaggagcttgcagtgagccgatatggcgccactgcactccagcctgggtgacagagcaagactctgtctcaaaaaaaaaaaaagaaaaaaaaaaactcaggggcttaagtaattcttcagtatcttaatttagtccttaatttcttttctgtgtaaacttaggtttcataaatcaacataaaattgaagcaatgacagtcacagaaaaagtgactgagccaactgtgataggcatttgtttttttttttgtttttgtttgtttttttttttttgagatggagtctcgcactgtcgcccaggctggagtgcagtggcaccatctcggctcaccacaacctccacctcccaggttcaagccattctcctgcctcagcctcctgagcagctgggactacaggcatgcgccaccatacccagctaattttttgtatttttagtagagacggggtttcaccatgctggtcttgaactcctgacctcttgatccacccgcctcagcctcccaaagtgttgggattacaggcttgagccaccgcacctggcctgcgataggcatttgtacacgtataagaaactgcatcttatatacagggatgcatctatagctgaatacagtaattctgacactttgggattttttttttctttttttttttttgagacggagtctctttctgtggcccaggctggagtgcagtggcacgatctcagctcactgcaacctctgcctcccgggttcaagcgattctcctgcctcagcctcctgagtagctgggattacaggcgcacaccaccagggccagttaatttttgtatttttagtagagatgaggtttcacaatgttggccaggatggtctcgatctcttgacctcgtgatatgcccgcctcggcttctcaaagtgctgggattacaggcgtgagccaccagcgcccggccctgaatacaaaagcaagagggaaaatcctcaatacttgccctctccttaaatcaaaagaacaaaggcgttttaatatctcatcattaatcattactgcctataataatctataaggatacataaagatactagaagacaaaaaagcgaagggtttggtcaggagacagtggcatgcaaacatacttttcctaaacgttccacacagaaagacaccctgaatctgctttagcctgagccttgctcccatcactgacctatgggtgtgtgaatcagaagactcagtattgttaaaatgtcagctgtcctccagattgtttcatacattcaatgcaattccagtcaaaatcccagagggcttgtagacactgacaagctgattctaaagttcacagaaaaaacgtgtagaaaaaccaaagcaattttgaaaaagaatgaagctggaagactcatattacttaactgacttaccatcatgctatagtaaacaatacagtattgtggctgtgtaaggatggccagacagagacaaatgtaaaatctaaaactatgaaacttccagtggaaaagacaggcaaaaatcttagtgccgttgggtcttgcatggacttcgcagataggatataaaaagcacaaaccaggaaaaaataataataataagctgaggtttgtcaaaagtaaaatgtgggccaggtgccgtggctcacacctgtaatcccagcactttgggaggccaaggggggggcggatcacaaggtcaggagatcgagaccatcctggctaacatggtgaaaccacgtctctaccaaaactacaaaaaattagctgggcgtgatggcgggcgcctgtagtcccagctactcaggaggctgaggcagaagaatggcgtgaacccaggaggtggagcttgcagtgagccaagatggtgccactgcactccagcctgggcaacagagcaagactccgactcaaaaaaagaaaaaaaaagtcaattctgggccaggcgtggtggctcacacctgtaatctcagcacgttgggaggccgaggcgggcggatcacaaggtcaggagttcaagaccagcctgaccaacatggtgaaacccagtctctactaaaaatacaaaacttagccaggcatggtggcgggcgcctataatcccagctacacgggaggctaaggcaggagaatggtgggaacccaggaagcggaggttacagtgagccgagatcacgccactgcactccagcctgggcgacagagcgagactctggctcaacaacaacaaaaaaagtaaggctgggggcggtggttcacgcctataatcccatcactttgggtggccaaggcgggcggatcacttcagaccaggacttcgagaccagcctggccaacaggatgagaccccatctcgactaaaaatacaaaaaattagccgggcatggtagcatgcacctgtaatcccagctacttgagaggctgaggtgggagaacatgggaggtggaggttgcagtgagctgagatcgtgccactgcactccagcctggcaacagagcgagactccatctcaaaaaaaaaaaaaagtaaaaatctgttcttcaaagatattgtttaaaaagatgaaaagacaagctatggactggtggaaatatttgtaaaacacatatctgacaaagatcttgtatccagaatgtatagagaactctgataactcaataaatagaaagtaaataatgcaacttaaaacaatttaaacactttatcaaagaagagatatggatggcaaattaagcacatgacaaaatgctcaacatcattaatcttcagagaaatgcaaattaaaaccatgaaataccactacacaccaaataagaattggctgaaaatactgaccacgggccgggcacggtggctcacgcctgtaatcccagcactttgggaggccgaggcgggcggatcacatggtcaagagattgagaccatcctggccaacatggtgaaaccccgtctctactaaagatacaaaaaaattagccgggcatggtggcacgtgcctgtagtcccagctactcaggaggctgaggcaagagaatggcttgaacccgggaggcggaggttgcagtgagctgagattgcgccactgcaaatccagcctggcgacagggcaagacgctgtctcaaaaaaaaaaaaaaaaaaaaagactgaccacctacaagtggccaaaagggaagtggaaaacctggaactctcgtactgtgctgtgggactgcaaaatggacaagcacatgggaaacaatgcggcagtttctcagcaagttaaacagacactggccacgtggcccagcaattccattcatagttacttagctaagagaaaaatgtatgtccctacaaagactgcacacttatgtttatattagctttatttcttacaaaaacaggaagcagtataaatgtccatccactggttgtaaactaacaagccatggtgcatccaaaccacagaacactacccggtaacagaaaggagcaaactgctcatccatgcaacaaggtgcgtgccagggaaagaagccaggcgcagaagatgatggcagacaccctgtgaccctgtgtcacgacacgctggaagcagcagaaggcaaagaaaccagatcagtggctgccaggagccgggactcagggggacctttcagggtgacgaacatgttctacatcttgactgcactggtgagtacatttcccaaaactcatggaactgaaccccaaaaaaggtgaattttactacaagtaaatgatactgccatgaaaccggatattaaaaatcttatttgtgcaaacattctgtactattggaagtactgtatccaaggcaagtatcacctgtggtcaagctcttcccattccattgagcgttaactgccaggacagtctccttcaagccccaaaaccagtgcaagtcacggtgtcgccagagccagtttgtaacagaggcgtctccatgccagaacatcaggtttttttttttttctttgagacaaggccttgcgctgttaccccagctgtggtgcagtggagcaatcacagctcactgcagccttgaactcccaggctcatgtgatcctcccacttcagcctcctgagtagctgagactaccaatatgcaccaccacgctcagctaattttttaagtttttgtagatacagggtctatgttgccctagctggtctcaaactcatagggtcaagagatcctcctgttttggcctcccaaactgctgggattacaggcatgagccaccgtgcctggcctgaatatcagcattctaatctggaaccgagatgctttgtgctaaagttctattcacagcatttgctgcgcttgacgcttggtgggttaaatctttcaagcagttgatgtacatttctgccactctcttagaataaagagctcttggctgggcgcggtggatcacacctgtaatcccagcacattgggaggccgaggcgggaggatcacctgaggtcaggacttagagactagcctagccaacatgatgaaaccctgtctctacaaaatacaaaaattagccaagcatggtggtgagtgcctgtaatcccagctactctggatgctgaggaaggagaatcacttgaacctgggaggcggaggttgcagtgagccgagatcacatcattgcactccagcctgagaaataggagtgaaactccgtctcaaaaaaaaaaaaaaaaagactgggcgcagtggctcacgcctctaatcccagcactttgggaggccgaggcgggtggatcatgaggtcaggagatcaagaccatcctggctaacatggtgaaaccctgtctctactaaaaatacaaaaaaaattagccgggcatggtggcgggtgcctgtagtcccagctacttgggaggttgaggcaggagaatggtgtgaacccaagaggcagagcttgcagtgagccgagatcgtgccactgcactccagactggataaagagctctttgggaaaacaaggttgttgcaccccttcctacacgttacctaggctttcccttttcccccaaataatgccttataaatggcaggcacatcattgctttaaaataatcaagttctgtctgggcgaggtggctcatggctgtaatcccaacgctttgggaggccaaggcaggtggatcatttgatttgaggccaggagttcaagaccagcctgaccaacatggtaaaacctcatctctactaaaaataccaaaaaactagccaggtgtggtggcacacgcctgaaatctcagctagtctggaggctcaggcaggagaatcactttaacctggaagatgcaggttgtagtgagtgaagatcgcaccactgcactccagcctgggtgacagagtaagactccgtctcaaaaaataaatatatcaggccgggcacagtggctcacgcctgtaatcccagcactttgggaagccgaggcgggtggatcacctgaggtcaggagttcaagaccagcctgacgaacatggagaaaccccgtctctactaaaaatacaaaaagtagctgagcgtggtagcacatacttgtaatcccagctactcgggaggctgaggcaggagaattgcttgaacccgggaggttggaggttgagccaagaaggcaccactgcactacagcctgggcaataagagcaaaactccgtctcaaaaaaaaaaatacatatatatatataaaataaataaataaaataatcaagttctacaactgttaggaactgaatgtttgtaactgagtgtctgtacccccctaaaattcatatatttaagtcctaatccccaatgtgactgtatttggaaatggggcctgtgagctgataaatgttaaatgaggtcactaggtgggaatcagatgtcacagggctggtgccctcttaagaggaggcagagagagcaagcagagtccccctctctgccatgtgaggacacagcaagaaagtggccacctgcaagccaagagagccctcaccaggaacccaatctgccaacaccttgatcttggacttcccagcctcctgaaccatgaaaataaatttctggccaggcacagtggctcacacctgtaatcctagcactttgagaggccgaggcagacagattgctggagctcaggagttcgagaccagcctgggcaacacagtgaaaccccatctctactaaaatagaaaaaaataagccaggtgtggtggtacgtgcctgtagtcccagctactcgggaggctgaggcaggagaatcgcttgaacctggaagagggaagttgcagtgagccgagatcatgccactgcactccagcctgggtgacagagcaggactctatctcaaaaattaaaaaaataaaataaaataaaaaataaatttctggccgggcgcgatagctcacgcctgtaatcccagcactttgggaggctgaggcaggcagatcacgaggtcaggagattgagaccatcctggctaacatggtgaaaccccgtctctactaaaaatacaaaataccactgccaggcgtggtggtgggcgcctgtagtcccagctactcgggaggctgaggcagaagaatggcaagaacccgggaggtggagcttgcagtgggccgagatcgcgccactgcactccagcctgggtgatagagtgagactctgtctcaaaaaatatataaataaataaataaataaataaataaataaataaatttctgttgcttaagccacccagaatgtagtattttgctatggtagtatgaacaaactaatacaataatcttaaagtttttgctggcaacattatttataaattcactaaaatcgttcctattaaaagataaactcaacgacatattttctctccttgtcttaacatgtaatgtcctaccatgtaataacatgtataacatgttacaataacaatggctaatgctaagtgctaacgctaaagttccttctaagcagtccgtgtatgatctcattaactcctcagagcaaatctatgaagtaggtacataggcgcagaaagatgtcgttagcccagagtaatgtgttgacagattggaaacccacataatttgtctctagggcctctgctcttcaccaaacctcctagtctatcaagtaaagacaaagggaaaaatcttcaaatacttcctcttgtcttaaagggataattttgatatgttatgatgatatctaaatactttcaaagttgtaaaataaactttgacttgatactggaatgtaagactaccaaaacaccccaaaaaacaaaaccaggtcagacacagtggttcacacctgtaatcccagcactttcggaggccgaagcaggtgaatcactttagttcagttgttcaagaccagcctgggcaatatggcgaaagctcatctctactaaaaatacaaaaattagccaggcatggtggcgcacgcctgtagtcccagctactccgaggctgaggcgggagaatcacttgaaccgggaggcagagggtgcagtgagctgagatcacaccactgcaccccagtctgggccacagagcaagactcttatctcaaaaaaacaaacaaaaaaacaaaaaaaaccaggtgcaagcacattataaggggtgaaattaaccaaaaaaaaaaaaaaaattgcttccaaacagcaaatatttcccatcctcgctcctttttagagtataatgtcggagctaattcattaattttcagacaaactaaacatttttgttgacaggaccagcgcatttctctccccatacaaaggcttcagaggaaatcaaacaaccagatggtcacttgggagactggaggcagtgaatgtggaggctgagggaactttctctcacccgttgtatgactttgttcaagtttttagctttccaggtttattaaataaataaatattctaggggctgggacttgagatcttttttaatataagcactacagctataaatttccctctgagtactgccttggctgcatcctaaataccttttggtgtattctatttttgtttcatttgtctcaaaacaaggtccccgttgtaaagacttatttgacccaccggttgctttaagagtgtggtgtttcatgtccacatatctgtgaattttccacttttccttctattatttttaatttcgttccattacagtcagaaaagatactctgtacggcaacgaacgtgacaatattgcattctggagagtatatgaacacaactaacttatacagttgtaacgaaggctaaatgatgtgcgtgaatcatgcgcaagaatcggtgggcagaacaccgaataaataccagttcttacatgacatttcactccacggaaaaatctggagcgcacactgcaccgccgcccgtgtggcctgcccgcaacccggtggctctgcccggccccggcccccggccccggcctcagccccgcacctcgtctccgcccgatggtccactcccgcttcctcaggaggacgtgcggctcgccctcctccgcgcccagacgcaggagccgtccccagggctgcggcggcggcgactgcttgccttcctcgggccgctccatcgggattcacatctgcggagaccccggaaacgcccatggagactcccgaccccagaggccgagactcggcgcccgccccaccccgcgggccccggcccggccgcccgcgcccacgcagccccgcagcccggcctggacgccggcgggcgccccctcccacggccgcaaccaggtcccccttcgccgcccgccgcagccccctcgccagccgcgcttacccccgccccgcgccgaacccggaaccggctgcgccgccgccgctgtcaagagacattgcggctccctcagctgatccgcggggcggggccagaggcctctgcgccccgcgattggctggcggcggcgctcaccaagagcggcagctaaagcggagccgggagtggcccgcgagagtaggcgcgtggagggcgctcggccatctttgatcctgaccaggcgacttcgtcgcctgcggatcacggaagtggctgcggtcggcgccatgttatgttggggcagaagggacggggaacttccggattggaagccccaaggattctgagagccccgctaatctggggatgactcctaggagtagaagacggtccatcttagttgtcacgaggtagtgcacgtggggaccctttcgggtacagttgcacacagtggatcacacagatccgaagtctgaggcacagggcgcggtccgcgagtgggagcggctgcttgtgggcagggtggacgcggggccacgtcttggccggcgttttgcggggtcttcctgttctgaacgcgcgtaacttttgcctcagtatctcacttcttggaatccggcggcgttcacgtgtgtgctccagagaagggcgccagagggtattccctgaaagtgaaaggtcggcgaaagaggagtaaagacggcgagacgcgtccacgcagggggagtctgtgcggtttggaggaacgcgccaatgtctgcactcatgaggagcccccaagggcggttttaagagggtgaagcaggaccgggcgcagtgacttacgcctgtaatctaagtgctttggaaggcctaggcaggaggatctcgagcccaggagttcgagattagcctgagacctcatcgctaccaaaataaataaagtaggcatccatttgtgtaaaacaaaccatatatacacacatatatacatatataaacatttgtatatataggtataggcatagttatctataccttgtaaaccaaaaataaaattgtaagcctccccaaccaactgaatgaactgagtctctcaacgccaaagttaatctgaaaaaccagttcagtccctgatgggaagcagggtttggatatgtcccattatactgtcctccctttggaattcaggtataactgaccagcgtcgacgttaaaacagacaacttaaggctgaccaaacggtctgtagcattaagatacatcacatgacaaatagcaggccctggaagaaaacgaagtattttaccctgacatgtatttatttaacatagttttacgtagccctgcaaaactgtctcctgggggaaatctactttgtagagaatctccttccttttccacatcttttcctgatccaggagagaatgtaagactctggcacctttttaactctgataagaaaagtttaccatctattctctctgaagcctgctgcctggagcggcatctgcattagaatggccagagtggtggtgctcaagcctgtaatcctagcactttgggaggccgaggtgggtggatcgcttgagcccaggaattcagaccatcctgggcaacatggggagaccccgtcttagctggacatgatgacagcacatgcctatagtcccagctattcaggaggctgaggtgggcagattccttgagcccgggaggacaaggctgcggtaaaccacagtctgtgccactgcaatccagcctgggcaacagagaccctgtcaaaaaaaaaataacaaaatagaaactttgtctcccttagcttaacccagacaatcctttctattgattccaggtctttagataataacaactctttcaaccaagtgccaatcagaaaatctttgaatccatctatgaactttctccctaaaaggtgtaaaaccggctgggcgcagtggctcacgtctgtaatcccagcagtttgggaggctgaggcaggtggatcatgtcaggcctctgaacctaagctaagccatcgcatcccctgtgacctgcatgtatatatatgcctagatggcctgaagtaactgaagaatcacaaaagaagtgaaaatggcctgttcctgccttagctgatgacattccactacaaaagaagtgaaaatggccggtccttgccttaactgatgacattaccttgtgaaattccttctcctggctcatcctggctcaaaaagctccctcattgagcaccttgtgacccccacccctgcccaccagagaacaacccccctttgactgtaattttcgtttacctacttaaatcttataaaacggccccactacccctatctgccctttgctgactctcttttcggactcagcccgcctacacccaggtgagtaaaaaactttattgctcacacaaagcctgtttgatcgtctcttcacatggacgcgagtgaaatttggtgccgtgactcggatcgggagacctcccttgggagatcaatcccctgtcctactctttgctccgtgagaaagatccacctacgacctcaggtcctcagaccaaccagcccaaggaacatctcaccaattttaaatcgggtaatggcctcttttcactctcttctcccacctctctcactatccttcaacctctttctcctttcaatcttggtgccacactttaatctctccctactcttaatttcagttcctttccttttctggtagagacaaaggagacgcgttttatccatgaacccaaaattccggcgccggtcatggactcgggaagacagtcttcccttggtgtttaatcgcgcagggacgcctgcctgattattcacccacgtttcagaggtgtctgaccatgcagggacgcctgccttggtccttcacccttagtggcaagtaatgcttttttggggggcaagaaccccccaaccccttctctccgtgtctctaccccttcttcactttcctgggtggcaagcaccccccacccccttctctccatgtctctaccctctcttttctctgggcttgcctccttcactatgggcaaacttccaccctccattcctccctcttctccattagcctgtgttctcaaaaacttaaaacctcttcaactcacacctgacctaaaacctaaacgccttgttttcttctgcaacaccgcttggccccaatacaaacttgacaatggctctaaatagccagaaaacggcactttcaacttctccattctacaagacctaaataatttttgtcaaaaaataggcaaatgatctgaggtgctttacatccaggcatttttcacacttcgttccctccctagtctctgttcccaatgcgattcctcccaaatcctccttctctccctcctgcctgttccctcagtcccaaccccaagcgtcgctgagtctttccagtcttccttttctacagacccatctgacctctcccctcctccccaggctgctcgtcgccaggccaagctaagtcccaattcttcctcagcctccgctcctccaccctataatctttctgtcacctcccctcctcacacccggtccggcttacagtttagttccttgactagctcttccccacctgcccaacaatttcctcttagagaggtggctggagctgaaggcatagtcagggtacatgtgcctttttctctatcagacctctctcagatcagtcaacatttaggctctttctcatcagaccccactaaacatatacaggaattccgatatctaactttgtcctacaagttaacctggagtgacctaaatgtcatcctgacttctaccctctccccagatgaacgggaaagagttttttctctagcccaatctcacgctgataaccaccggcttcacgagccatacctccaggaaggcatcagagcagttccccgagaggatccccaatggaactatcaggcagattccccaggtacagctaggcaagattacatgatttcctgcctagttgaagggcttaaaaaggcagcttacaaacctgttaattatgacaagcttaaagaaactacccaaggtaaagacgaaaaccaagcccagttcatggcctgcttagcagcaacactcagacactttaccgccctagacccagaagggccagaaggccgccttattcttaatatgcattttatcatccaatccactcctgacattaggaaaaaacttcaaaaattagaatctggccctcaaaccccacaataggaatgaatcaaccttgccttcaaggtgtacaataatagagaggaggcagccagacggcaacgcatttctgagttacaattacttgcctctgctgtaagacaaaacccagccacacctccagcacacaagaaattcaaaatgcctaagccgcacacacctaagccacagcagtcaagcattcttacaagacttcctccatcaggatcttgcttcaagtgccagaaatctggccactgagccaaggaatgcccatagcctgggattcctcccaagccgtgtcccatctgtgcagggacccactggaaatcagactgcccagctcgcctggcagccacccctagagcccctaaagctctagcccaagactctctgactgactccttccaagatctgcttggcttagcggctgaagactgacgctgcctgatcaccctggaagccccctggaccatcatggatgctgagcttcgggtaactctcacagtggcgggtaagtccatcccctgtttaatcgatacgggggctacccactccacgttaccttcttttcaagggcctgtttcccttgcccctataactgttgtgggtgttgacggccaagcttcaaaacccctcaaaactcccccactctggtgccaacttggacaacattcttttatgcactcttttttagttatccccacttgcccagttcccttattaggccgagacattttaaccaaattatctgcttccctgactattcctggactacagccatatctcattgccgcccttcttcccaacccaaggcctgctttgcgtcttcctctcgtatccccccaccttaacccacaaatataggacacctctactccctccctggcaaccgatcacatgcccattactatccccttaaaacctaatcaaccttaccccgctcaatgccaatatcccatcccgtggcatgctttaaaaggattaaagcctgttaccactcgcctgctacagcatgggcttctaaaacctataaactctccttacaattcccccattttaccgtccaaaaaccagacaagtcttacaggttagttcaggatctgcgccttatcaaccaaattgttttgcctagtcaccacgtggtgccccaccgtacactcttttgtcctcaataccttcctccacaactcactattccgttcttgatcttaaagatgcttttttcactattccgctgcacccctcgtcccagcctctctttgcttttacctggactgaccctgacacccatcggtcccagcagcttacctgggctgtgctgccgcaaggtttcggggacagccctcattacttcagccaagctctttctcatgatttactttctttccacccctccgcttctcaccttattcaatatgttgatgaccttcttctttgtagcccctcctttgaatattctcaacaagacaccctcctgctccttcaacatttattctccaaaggatatcaggtatccccctccaaagctcaaatttcttcatctgttacctacctcatgataattcttcataaagacacacgtgctctccctgctgatcatgtccaactgatatctcaaaccccaacaccgtctacaaaacaactcctttccttcctaggcatggttagatacgttcaactttggatacatggttttgccatcctaacaaaaccatcatataaactcacaaaaggaaacctagctgaccccatagatcctaaatcctttccccactcctctttcctttccttaaagacagttttagagactgcccccactagctctccctgattcatcccaacccttttcattacacacagccgaagtgcagagctgtgcagtcagaattgttacacaaggaccaggattgcatcctgtagccttttggccaaacaacttgactttactgttttaggctggccatcatgtctccatgcagtggctgctgccgccctaatactttcagaggccctcaaaaatcacaaactatgctccactcactctctgcagctctcataacttccaaaatctattttcttcctcacacctgatacatataatttctgctccctggctccttcagctatactcactcttcctttagtctcccacaattaccattgctcctggcccagacttcaattcggcctcccacattattccggataccacacctgaccctcatgactgtatctctctgatccacctgacattcaccccatatttccttctttcctgttcctcaccctgatcacatttggtttattgatggcagttccaccaggcctaattgccactcactagcaaaggcaggctatgctatagtatcttccacatctatcattgaggctaccactctgcctccctccactacctctcaggaagctgaactagttgccttaactcagtccctcactcttttttttttttttttttttttttttttgagatggagtttcgctcttattgcccaggctggagtgcaatggcgcaatctcggctcactgcaacctctgcctcctgggttcaagcaattcttttgcctcagcctcccaagtagctgggatgacaggcatgcaccaccacgcccggctaattttgtatttgtagtagagacagggtttctccatgttggtcaggctggtcttgaactcccaaactcaggtgatctgcccgtctcagcctcccaaagtgctgggattacaggtgtgagccaccacacccggcgccctcactcttgcaaaaggactacatgtcaatatttatactgactctaaatatgccttccatattctgcaccaccatgctgttatataggctgaaagaggtttcctcactacgcaaagttcctccatcattaatgcctctttaataaaaactctgctcaaggccgctcctttatgtatctctcagcaaagacccactggaattcccctaggtaacctttcaccttctcgatgttcctttattcttcatctccaaagcccaactacacacatcactgaaacaattgaagccttccagctccatattacagataagccctctatcaatactgacaaacttaaaaatattagtagtaattattgcttaagaagacacttaccctgcatttcactccatccttggctaccttccccttgctcatcaggctctcctcccaggccctcttcttgtttacttatacccagacccataaataatagtgaaaggttgctcgtagatacttgacgttttctcatacaccatgaaaatcgaacctccccctctatgcagttaccccatcatgaaaggttgctcgtagacacttgacatttgctcacacaccatgaaaatcgaccctcccctctacgcagttacctcatgatgaaaggttgctcgtagaaacgcgacgttttctcgcacaccatgaaaatcgaacctccccctctacgcagttaccccatcatgaaaggttgctcgtagacactcagcgtttcctcatacaccatgaaaatcgaacctccccctctacgcagttaccccatcatgaaaggttgctcgtagacactcagcgtttcctcatacaccatgaaaatcgaacctccccctctacgcagttaccccatcatgaaaggttgctcatagacactcgacattttctcatacaccatgaaagtctaacctccccctctatgcagttaccccatcatgaaaggttgctcgtagacacttgacatttgctcacacaccatgaaaatcgaccctcccctctacgcagttacctcatgatgaaaggttgctcgtagaaacgcgacgttttctcgcacaccatgaaaatcgaacctccccctctacgcagttaccccatcatgaaaggttgctcgtagacactcagcgtttcctcatacaccatgaaaatcgaacctccctctctacgcagttaccccatcatgaaaggttgcccatagacactcgacattttctcatataccatgaaagtctaacctccccctctatgcagttaccccatcatgaaaggttgctcgtagacacttgatgtcttctcacacaccatgaaaatcgaccctcccctctacgcagttacctcatcatgaaaggttgctcgtagacacgcaacgctttctcgcacaccatgaaaatcgaacctccccctctacgcagttaccccatcatgaaaagttgcttgtagacactcagcgtttcctcatacaccatgaaaatcaaacctcctcctctacgcagttaccccatcatgaaaggttgctcgtagacactcagcatttcctcatacaccatgaaaatcgaacctccctctctacgcagttaccccatcatgaaaggttgcccatagacactcaacattttctcatacaccatgaaagtctaacctccccctctatgcagttaccccatcatgaaaggttgctcgtagacacttgacgttttctcacacaccatgaaaatcgaccctcccctcgacgcagttacctcatcatgaaaggttgctcgtagacactcgacgttttctcgcacaccatgaaaatcgaacctccctctctacgcagttacctcatcatgaaaggttgctcatagacactcgacattttctcatacatcatgaaagtctaacctccccctctatgcagttaccccatcatgaaaggttgctcgtagacacttgacgttttctcacacaccatgaaaatcgatcctctcctctacgcagttaccccatcatgaaaggttgctcgtagacactcgacattttctcacacaccatgaaaatggaacctccccctctacgcagttaccccatcatgaaaggttgcttgtagacactcagcgtttcctcatacaccatgaaaatcgaacctccctctctacgcagttaccccatcatgaaaggttgctcgtagacactcgacgttttctcatacaccatgaaagtctaacctccccctctacgcagttaccccatcatgaaaggttgctcgtagacactcaacgttttctcacacaccatgaaaatcgatcctcccctctatgcagttaccccatcatgaaaggttgctcgtagacactcaatgttttctcacacaccatgaaaatcgatcctcccctctatgcagttaccccatcatgaaaggttgctcatagacactagacgttttctcatacaccatgaaaatcgaacgtccccctctatgcagtcaccccaccagtccccattacaacctctgatggctgctgccctagctggatccctaggagtgtaggtacaagacacccctttcagcactccttctcatctttttactttgcatctccaattttgcctggcacaaggtcccttcttcctctgtggatcctctacctacatgtgtctacctgctaattggacaggcacatgcacattagttttccttactcccaaaattcaatttgccaataggagcaaaaagctccttgttcccctcatgacaccaacatgacaaaaaagagttattccactaattcccttgcttgtcggtttaagactttctgcctctactattgctctcagtactgggatagcaggcatttcaacctctgtcacaaccttctgtagcctctctaatgacttctctgctagcatcacagacatatcacaaactttatcagtcctccaggcccaagttgactctttagctgtcctccaaaatcgctgaggccttgacttactcaatgctgaaaaaggaggactctgtatatttttaaatgaagagtgttgtttttacctaaattaatctggcctggtgtatgacaacataaaaaaactcaaggatag

SEQ ID NO: 380 - DNA, 121829 bp, Homo sapiens
cccgggctggcggccactgcgtcctgggtgcactcggtggcaaagcgctgctaccgggcacgggtctctgcagctcaaaacctgcccggctggagcgcaccaatagttgccccaccactttaatgaatgccgtgtggcccggcatgggaaggctgggaaagcccgaaaaccccagtcatctctggcaacgaagtttccccgagttggctggctcccttaccccctccccacgctccagcccggggtagctgtgagaccggaggagacgatgcctgccgcgtggggagtctcagggtggctggcaatgaacagctcagccagagaagagtcgaacacggattccggggcgagtcaggagaatttcctgggacagcgaatggcagggagtgatgaagcagcttggggaatcctctttagtgccagttctgcaaacagaagagggaggagatgggctgattagaatctactttgaattcacaaatattagactaaattcattaatctgccttggattgtttccctttggtttcatccttcttccctgaagtccagaagaaatcccagtcttccatcttttccccacccccaagacacctccaagtcctcttcccaaaagaactgcagtcaggtttccatgtcattttgtgaaaataccccccgccacacacacaccctcctttaccacacacacatacacacagacacgcaagcatccccttcatatacccactcagtggtagtaaaattgatagcgttatacattaacgtgaacttaaacgtgccccaccaaaaattttcttccccctacccccacctcgtgaagtttccacattggtctcagcgtttaagcatgcctacatttgttttctagtcccaactgacatctgcaaaaacacacccttaaatatatgttgctctaatcctgggctctgcttttggcttggaagaactagagacacatcagaagtgaaaggacagagggtgtcatatgtcatacacctggaagcgtgaagctaggctgctccataatgaactctgtgtgtgtaagtcctgcagatttattttgatgactcaaacctctaattggggattaatgaggataatatactataaactccaaagaagttgtaattaaagtgtcaggctgatggacatgattcataaccaggaactgcatcctctttccctataagtttctctatttaaaatcttaacccttaggacaatatttttatgctcctataaagcattgtgccaaacatcttaccaaaaatgtacagagctatagtccttcttcttatagaacaagttttagagtttttctctctctgtattacttccaaaccataatcccaggtaattttttaaagagatggagctagaatatttttgcttttcccctccactatttactttgaaaattttcaaacacacagaaaagttacagttgtttggtaaaaaccagtgccacagtttgaatgtgtttctctaaaactcatgtaaaacttactctccaatgtaattgtcttaagaggtgaggcctttaggagatgattaggtcataaggactcccctcccacttatgaattggtgccttttaaaaaagggcttgcgggaatgagcttgtctcttattgcccttctgtcatgtgaggacacagcaaggagatgctatctcggaagcagagaacaagccttggttttggacttcccaacctccagaactatgagaagtaaatttccattatttataaactaaccagcaaaaacggactaagacaagcaggatccaatcaaagattgcatttgcttgttctgtttagtgtgttttattctagaaaagcgtcttcatatttttctaatgccattgattttttttttcacagaatccaagctcatttgctttctgatgtgtttaatggcctgacgtagctaaagataagttgagtcaaagggggaaaattatttcctggtcatagtagatcattaaaataagttaacattttctataaacttggcatctgtgccagtatccatagaatggaagacagttgtagctccactcactctcctccttagtctttgctttattcaaagaagttatctttgttttttatccaaaaggtcttgtttcaggaatggatgagtgttttcacacatatacaccaagttgacaggcacatatggtattttactgaatttaaaaataagaactcagcaaggtcacacaccataatgaatgagctctgattttcatgtcgttctaggaaggttttaatttgaaccaaacttaaagacgtgtagaaagcatgtgtgctttcaataacctattgatttatgagcaagtcttattctcagggtctttcaacttggcagagttgaaaattctttagagggacctactgtctgggcatatggacagatgcttctcccagagagcctatgaaaggcttggaatagcctggagagtagaaaaaattgtgttcagtaggaagtgagacacagtctcacattgcttctcagccttttagcgaagatcaagtgtgagacagagtctccacctcctatgggaatgtgtgaaataaattcatttcatttttgctgctcttaaagctaatatttgtttgcttgaatatcattggaacaaatgtaatataagaactttcctcttctacaattaagtcagctaaatgtttgctgaatcatgaaaccagatttcaaagaggtcatttcaagattactggttcagtcttctacttctaaataagagtccaatatatatgactattcaaggtttctaaatatatttagtgaaagattccaaaccctttgttgatgggcttttccaaaatttaagaaacttcggtggagtaaaaatattctcttatttccagtctaaatctctttcttctttaaatttttcagtacttaagtgaagatgaggagaaaccagtctttttctgtaactgttatgtattggagattaaattgttcaatgtcctcttcttcatatcaaataacccttttttacccctttactgacatgtataggctaatatggccaactcatacttttcttaaaagcattctttttcactacaagtttcagaaaaaaaaatcaaagtctttctaagccttaccgagtttctgcatctataaaataggggttcataataagaacaagtatttggccagcttatgcacattttagcccaccgttcttttcagtagggagcactgcaaaaccaaccaagtgaatcatgccaagctttattcagtttcctcacctgtaaaatggagcactaaatatctggctagttctgcctacagggttgctgtaaggaggcaatagatgtggaagtgctttgtaaactgtgtaggaattcacatattaaaggaatcatctttaggattacttgttccataagattcttcttactatccaccgggcacatagcaaccactttttaagattatcccatttatttctcataacaatcctagaagatgggcaatattattgtgatttaatttaaaataatacctgacatgtattgggcatataaatatttgttgaggagaacactggagcttagagaggttactgcttatccaaataagcaaggctagttagagatggaagtagaaatcaaacccgagctatctgactgaagttggggacccactaatctctaagtcaaattaccattcccaatgccaagatgattacacaaagttttgatctctggcaattgcagctgaaacactcttgaccctttttccttttcattgttacctccccaactctggggtactattcccttgtattattctctctatcaaagtgtgttgtctgtgttctttgagagaactgatgctcaaagacaatgttattcctatcccagaggtatttgcatttttaacaccaggtgaacatttaagccaaagtatagaaaaataaatcttagaccatcagacattatgaaacaaataaaagaagtatggggaagaggtgagtagagagggaggtgagaaaacctttgttatgtccctgaaatcatggcaaatatgtgaccatcctgaagtatttacccagatatgcagtcttcttggaattacttcaacttttatccagtgtaatataagaccacattatgttgctcaacctactctactctttcagtggtcaattaataatgctgaggtacggaaagaggatctatttccagtttatataatgcctctatatttagattccaatactatgtttttatttaggttttttttttttttagatggagtcttgcctctgtcacccaggctggagtgcagtggtgcaatctcagctcactgcaacttccgtctcctgggctcaagcgattctcctgcctcagcctccccagtagctggaactacaggtgcccaccaccacgcctggctaatttttgtactttttagtatggacggggtttcaccatgttggccaggctggtctcgaactcctgacctcaaatgatccacctgcctcggcctcccaacgtgctaagattacaggtgtgagccaccgtacctggccccagtactatatttttaatagtcatctaatgttactgatacacattgaaatgctgatcctcttggacctgcaaagaatttcatcaggaatcaaagttcagttgacaactgtaatttctaagaatcttatggtatcttttatgaaaaactattctttttcatttttttccaaatttgcgtccttgtttttcaagaagaatttcaaaagagtgatgtcttcatgttccaaagcgttgtaagtgactataatcttcaggtagaaagaatgcaacatttttagaaaacctttatcaattattgcctcactatataatgcaccgtagtaaaatctcaactaatcagaactcactcaattaaaactacctccagcaatgttgtagaagagaaagtcaaacactgccagcctagatggccactgctagcctagatggcagatagagaaaggcactcccctctggtgggaaacaacgcactatggcactgtcttaacttgagacagtatctttgttctttgttcacctcagaagacatcccttggggacaaggggtggggtatgagacaggaaggatgtgccaataccaggaagcacagcagtatgtccagaatttgaactggctctcagtcccactcaccacctcagcctagtgcctgtatacaatgtgcaaactgaacaattgtacgctctggccctctatataagatacacagatggatacaataagcaagaatatatgatgaattccaatcattcaaggtcaatttttggaaagagaatatttaagtactttatgtcatacatgaattcaaattaagtttagattagttttgagggagaaaatatatcattgtgtttgtcgtttctggatattttcagcttctcttgttttcctaagtgctatttttctccattggaaagaaatcaaaacattatggctatgcaatatcataaccatgttcttcctttaaatcataacagtaagcttgaacttgatattacagggatgcccccattgctattgagccatgaatgaggaaaataataaatttaattctaaaatattgggagtggggaatctacactctgcctctgaccagctgggtaacttgttattttattaaagaagctgctgagaccaagtaaagctcatactttagtgatggtttgctttgctttactctactcctaggagatagaataatctattattttctgtctttggtgccaggacttttatttgtaacatgtgcacattggacttggtatatttttttctggcatatagaatttgtttcttagagacagggcctcactatgatgtccaggctggagtgcagtggctattcacaggcacaatcatagcacactactcctccatagcctcaaactcctgaactcaagtgatcctctagcctcagcttcctgagtagctgagactatgaatatgtgccaccatgcccagccctggtatataaactttataagctgacatcaaagactcatccattcaattttagattcaagaaagaataaataacctggagttagtgcatgtatccattcttttgtcctttatccatagaaagctagagaaccttacaatgttttccatattcgcagtgaccctaagtccatcaaacagaaattcagttgctttagaaattctgagcttccagtgagaaaactgagtcataaatataatcattagtagggaccatggagatcatgtagtgggagctttgcaaaatttcttagtggcaagaagcagattcctaggtccaagtgcttcctctgagatcctgtttcagtgggtctaaggtggggtctggagattcatttatgcaacaagagccccagagccccaggtgacttattttttgagacacagtctcactctctcactcagactgtagtacggtgttgggttcatagcccactgcaaactcaaactcctaggctcaagcaatcctcccatgtcagcctccaaaagtgttgggattacaggcatgaaccaccaaacctggccaccaggtgattcttccatgcaaagtctggttacttctaatgtactagagccctttgttttacagataacagtgaggccctgagaagtaaggtgacttccctgaggccaaacagctggtctgtgatagaattgggactggaacagaaatattctgactggcttcaagtcttcataaaatggactaatgtatttaagaaacatttgcaagcatgatgggagttaggagttgtgaaaaaagcaaagttacacaatcagaaatttcagttatccgaaactcctcatttcagatgcatttgggttaatcaagcatttataacgcctctgtcccttatttgttggactattgaagtcttttctccacgttttctctgatttgccccaaaatcccaaaagccatgtgatttactgggttccccttagtaactttgggcctattaacacctccatccttctcatacctcttggccaatgctcttccccctccttaaaattcatataaagccagacatatctctcttgactcatgttacacagctcctttctataccgtttccttcgtcatccattcatttaggtgctctatttctcaagcccttcgtgtttaactttttttttttttaaagactaagtctcgctctttcgcccaggctggagtgtagtgatgctctcgccactcactgcaacctctgcctccagggctcaggcaattctcgcctcagcctcccaagtagctgggattacaggcaagtgcctggctaatttttgtgtttttagtagagatgggcttcaccatgttgcccagcctgctcttgaacccctgggctcaagtgatccacccacctcggcctcccaaaatgctgggattacaggcatgagccaccgtgcccagcccctttgtgtttaactgtggtgcatgcttgtttatatgaatgttaagtttttcacatatgagatagctgtcctagagtgggaagaccactctaatagaaattgaaactactaatttctagtctcagctctgccactggtaagcggtctgaacttgagtaagccactttgcccgtctgagcttttgttgttcaaggaaagggttaaacgctgattttctgagtctgtctgactgtctgactctgtgtctgtcccatttctttaaggaagaaactatctttcctgatttatcttcttttcactgagcctatttcgtaaagttacttagtgtgctctctcgataaatgctgacacttccttcttggtctagtttggcttcccttctccacctgctcccctcacagatggtgcacgagccacatatctggtcaccattgaactttgattttggtaaagactagatttttaaagcaatattcaccgtgtgtctttccagtgtcacccttccctcccatgaaatggcacaccgtgttccttggccctccacatttgccattaaaacaaaacattgttttcacatgtcccttctatttaacaggttatttttttatttttggtactcctgcacttgcatttattgaatcataatatttaattttatttctgatgtcctggacctctttctttagaatttctatttacagtgagctttctgtttagctgtgatttaggtcacattggtttatgtttttgagttttttaagaaaatatttggtctcacaatcacaaccattattacattttttgttttgattaagtttttttagaaaaatagctcttaaaaatatgacactatatcacacataaaattgctctattcagtcagttgatccatattcaagtggactgacatccttccttcctccgtccctccctctctctctctctttttctttccttccttccttccttccttctttccttccttctttctttctttttgatatggagtctcgctctgtcacccaggctggagtgcagtggtgcaatctcatctcactgcaaccttcaagtggattaactttagatacacatgaatgataatagagtataagaaatatgaagtgatagaatgtgtctgttcaatgagcaaacactctgagttcaaaataatacacaaaattgtaaaccaagaaaatgtgggatttcaggaccttggacagttagaagtactctggctgtattccctggtattgcctcacaagcaagtttgtgatacatttttacatctgcagtactatatccgacatggtgccctgaaatatcctgctgttatttttttttttcagatgaagcaaaataaaattgcctgttcaaaaataatgtggaaaatgaaggttttcctacacatttatctgaccttctttctaaaataaatgtaacgggaaaatgtattgctgactatgctaatatatcaagttacgtgaactccatgctgaaacttaaagatgatcaaaaccccagacaatggcaagtgcaaattgctgggcgccattctgaaacttagattttaaatctataatttcttgttttaccacgtgtattttcagaaaatgcaaacaataactttgaaaactgatcatggagggttttctgtgatttatattttacgagaagaaaatcgaggcttccctaataaggtctataaagcccaggctgtatgctcagatccaggagagcaaacagcttcgaggcattgatgcaactgtgctctcaggcatggtggcggggctactgcaatttggcactaagtggctttcacaaatgcttttttagctagtttgctatttctttttaaaatataaccaaatacttcattacacagttataaagaactataggtgagaaataccaggaaaaaaagttcaatgtcataaccatccaagaaatgcaaattgaacaataggatgctgtttttcatctctcagattggctgagatttaaaaagatgtccagggatgtggggaaatgggcactttcatgctctgctggcgggaatgcagattggcacaagtcctggggcgggtgattaggaaatatggatcaaaagccttaagaaaatgatgaaatggtatatgtaataacatgaaaaaacagtctcagttcattgctaagtggaaaaaaacaagttataatctggcgcagtggctcatgcctgtaatcccagcatttttggaggccaaggcaggtggatcacttgatgtcaggagtttgaagccagcctggccaacatggtgaaaactggtctgtaccaaaaatatgaaaattagccattagccagacatggtggctaatcctagctactcaggaggctaaagcatgagaatcacatgaaccttggaggcaaaggttacagtgagccaagatcatgccactgcactccaggctcggtgacagagcgagactccatctcaaaaaaaacaaacaagttaccaagttatacaatcatacgtttgtaatatttaagcacacattctgaacagatatatatgaaaatatcattatctcagagagtggaagagggatgagtatttatattttatttacatgttttctaatgtatctgtatccaacataaattactgtttcgatcatgaattattatttcatttaaaaaatgacaatttgcttaattatcaatagaattctcatagtaaatactgtctggtgtctccttttcccaggtctacgtttactggagttggctttggtgtgtttaagacactgaggagaagccagtggggctgggcagttgtgggtaagaaagggaatagccctagataagtgtagacaaagttggaggataaattatttattctcacctttgaagccatggtagtgtttggattttattctagaagcaatggactaccatttcaggtacagagcaaggaagagatggtgattagattataaattttcgttttgtttttaattaattattctgcttggctctgtgcagagaatggaagggagagaggtgagattagaagccaggaagatcagtaggaccatcatagaatatagtagatgagattaaagcactgagagtatagatggaaagaagttagaaagatttcatttaccttttttttagtgaaaatgacaggacttgcttgtgcgacaaggtaggaaaaaaatcaaggatatctcacacatttgtaccagaaataactctgacagttactccttattgtgaaattgagaaagataaactgtgctttttagttattagttttcaaatctttctactgaaatacaccattatggtgggttggatggtggcctcccaaaaaatatgtccgcatgttgggaaaagttttgcaggtgtgattgagttaagaattctgagatgaggagatcatcctagactatatgatgggccctaaatccaaggacaaatatccttataagagaggcaagaggagactacatagacagaagaggaggcagcaatgtgaccatagaggcggagactggagtgatatggccacaaatcaagcaatgccaatggccaccagaagctggaagaggcccaaaatggatcctcccctagagccacaggagagagcacacctctgctggatttcagacctctgtcatccagaactctgagagagtccatttctgtcattttaagccaccaatttgtggtaatttgttaaggcagctacaggaaactaatacagttattgatatggttcggctctgtgtccccacccaaatctcacgtcaaattttaattcccaatgttggagtaggggcctagtgggaggtgactggatcatggaggcagatttctcccttgctgttctcatgaaagtgagtgagttctcatgagatctggttgtttaaaagtgtatagcactatcctcttctctctcttcctccttctctggccatgtaggatgtacctgcttcccctcgccttctgccatgatggtaagtttccctaggcctttccagccatgcttccagtacagcctgcagaactgtgtgtcaattaaatctcttttctttataaactacccattctcaggtagttctgtgtagcaacagactaatacagtcattgatacaaaaacctgcacaaatcttaagtatggaatttaataaattatcacaaagtgtttattactttttcccattaaaaaaattaattaggcagattttcaaacatacacaaaaacagagagtaatataatgaataaggtaatattcactataagtaacataatgaatcctcatgtgcccaaaacccattttcttttttttattattattatactttaagttctgggatacatgtgcagaacatgaaggtttgttgcataggaatacatgtgccatggcgccaaaatccattttcaacaattgtcaacacatgagcaatctagtttcatgtacactcccactcaccaccctgccactggattattttgaagcaaatcccagacatcatattgttccatctataaatacttcaaatacatctctaaaaacaatgttttctgctgggcagggtggctcatgccggtaatcctagcactttgggaggtcaaggcaggcaggttgcttgaggtcaggagttcaagaccatcctggccaacatggtgaaaccctgtctctactaaaaatacaaaaaaattagctgagcatggtggcaggcacctgtaatcccagctactggggaggctaaggcaggagaatcacttgaacccaggaggcagaggttgcagtgagccaagatcacgccactgcactccagcctgggcgacggagcaagactccatctcaaaaaaaaaaaaaaaaaagtttccttttttaacataaccaaaatatgatacatcacctaaaaaattaacaaaatattttaataatatcagatatccaatcagtattcaaatttcccccaattgtctgatatttggtttctttattgagttagtttgtttgcaacaggattcaaaccaggtctatacactgcatctggtaacatatctcttgttctatgaatttcttcttttcttcttccctctaaattatttgttgaagaaaccaggtcaggttgtttgcgttgtaaaatttcccagattttaatttatctctgagtatctttagtatattcctatcttccctgcatttcctgtaaatgagaaattagatctacagcgtattcaggttcaatatatttggaaagaatgcttcataggtggggttttgtactttacatcttatcaccataatgcctgggtgtcttttcatgtgacactaagattggctaatggtttcatttgttgtcagcctgatctacccactacaaagttccacatttgcttttcccctaattgttttacaactatttgtgatcattgccttgagccatttttgggggttgcaaaatgataacattttatttctactttttctgcctttattagctggaattattgtataatgaactctcctttatacactattcaattaccttgaggtatagcccatccacaaaaaataatgataaatgttcagttctttccctttatgtaccagttgtcagaataagtagttggttccctagcatcctccaaaggtgattaacaggatttgttttgttttacatcattaggaaataatgaattttactttgattattatttcatttcttattttttgagttctgcccagaagacacagtgtactatttccttggctgtgtctcctaggagtctatgtcagccagtgtctagcaacctattcacttttagaactatacatggatcattggccccagcccctgttaaaagagaggaggagacggagggtcagagtggcctgataatttgacgaaatcactcctgtcgttagtagcaggatccaggtaagagcccagatccatgcttttcaactgcaacctaactaagatgctaagctatttagattgctaaatattttgcttccagatgcagagtagccacaataattgcagtaataaatatattcatctggtagttaaaaaagtaatatttgaacatcttgtggtgtatgtactacttcttattgtggtttggccaaaagaactgtaaataacaattcgtgcaccaataaagtaatctgagtcaattgttaaatcaaaggatttgagttcggttagggaaaaaacactttggcactgaaaagaatctgttttgcttacattttaaagcagaacatgaaatagccagactaaaagaaaggttttcatggctagttctactcagcttctatttctattttaattgtatttaaaattaaatattcatttgaaagtaatatttaaattttaattttaaaataaatttaaattattttgattaaatttaattaagtttaaaatttttatttttaaatttaaattattttaatgtaattacatttaaatggttttaattttattaaatttaaatattttaaattttaaaataagtagtaatttaaattttaataataatttttcaatattacatacaatgtaatatacacatctgaattcccatattcatggctctttattacagggattcagataggatgtagttcaaactatatgcccctccttcctgaaatacagtcaatgatggtgaagtgtaatgtaatactcctggggttgtaagagaatcattagctctttttcctagagcaagatttacaaagtactttcaacatcaattattaggcatctgttacagtatttaagaactaagcctggagtcttttcacatgcaaaactgtatttgaagtcaacatatgtcctctaattaacatgttatattttactatatatgatatgcatgccagtggagttgaaggaactagaaaatttttatctggagatgatcaataataacagttttttcaattttattcactactaaatggataagggagtgtatgtcttcttcataactccatgcaaaaaccaatgtgtgtgaaatacagtaaaatgttgaacaacatgggtttaaactgcaagaatccacttatacacagattttcttccacctctgccattcctgagatagcaagaccaacacttcctcttcctcctcctcctcagcctattcaacatgaagacgacagggatgaaaacatttatgatgatccatgtccccttaataaattgtaaatatattgtctctaccttatgattttcttaacaactttttcttttctctagcttagtttattgtaagactgtagtataaaataaatatacaaatatgtattaatcaactgttcatgttattggtaaggctttcagtcaacagtaggctattagtagttaagttttgggggagtcaaaagttaaacacagattactgactgcgcagggagtcggtacccctaacccctgcagtgttcaatgcaaggtcaactgtacactgacacacacacacacacacacacacacacacacacacacacacatatatatatatttaattgagacggagtctcactttgtttcccaggctagagtgcagtggcgcatcttagctcactgcaacctctgcctccctggttcaagcaattctcctgcctcagcctcctaagtatctgggattacaggtgcgtgccaccacacccagttaatttttgtatttttagtagagatgaggtctcaccatgttggccaggctggtctcaaactcctgacctcaagtgatctgcccacttcagcttcccaaagtgctgggattacgggtgtgagccacagtgcccagcccactgacatatattttgagtcagcaatgacacaggaaagagagctgggatcacttcttcctcattattttccccatgcatccaggtagaaacgaggaatatacatgcacctttgcatttccaaatctatttatttttatttatattttttacttttttcttctataaccaatcatctaacctatttttgtttctagaaactccaattctttaaaaacaatattggtataaaatctcttcccttcccctctccacccatgcattcttcagtcctttagcagtcatgcttttctcatggcctatgtgtacctctctctttcttctctttgttttattcccttgtatggttcaaaattcctggaagaagataagcaggagccatctgtgtcccacaattaggagggggactcctgtgataaagcattggttcccaaatcttggagtttgtttaaaaatacagactatactcatcatcccacatttggttttccagatctccaaggttagggccctaaaatgtgtaattatggcaagctccctaagcaattctgatggagagagtccaaaaacagatacttgggaaccactcttacgaagcacagtgattattcttgaccatagacaagagcacacatttctcttttcccacctatctccattaaacaaaacctaaccaaacacttttaccgtaataaactttaattacctccacaaactcttaagaaactttaaatcctggtgtctaaattataaaactattattggaaagaatatttacctttcagggagaagtctctgcttcaagccatatcattatcatactttgtatatcacatataatgctactaacaacatctgggacaggtatttgcaccagttaaggcccttgcagtttcaagtatcagaaaaccgaactcaaaccatattaagcagaccagaaatgtatgggctcacattactgaaaagaccaagtattattggcttcagccttggcttgatccaaaagactcaaaatatttcaattctctctctctcagctgcacctctcctgggctggctctgttttcaacaagatcttcccttgaggttgcaaggtgctttgcaatagttctacatctcattttccaaaggtcaaattcaccagggaagagtctttctctccctgtgtggtcctaacacaggtcttcttacatgtcaatgcttctgactgggtcacatgcccatccttaaaccaatgactgtgccctaaggaatgtgatgtttgattggccaggtgtgaattagtagcttgcactctctgctggaggtagggatggggtcaatacacatagaccaactgtggatctaggatggctctccaaaaaaataccgggtgcggctaccaaaagaaggacactagatagtcaaaaatggcaaatatcttccccagtataggtgattacaaggctatttcgaccagaaaacactagtaagttgcaaaactgaaatcccaaccaggaatttcaatctcttatgaacatcaccatacatacacccaaaatgagacattactatctgttctaacagagtcaaagcatgtttattatcttttcctttcattttgtccttctgatttttatatccagttttgttgctcttgttgttgttgttgttgttgttgttgttgttattgttgttgttttgagacggggtctcgctctgtcgcccaggctggagtgcagtggcacgctcttggctaactgcaggctctgccccacggggttcatgccattctcctgtctcagcctcccaagtagctgggactacaggcgcccaccacctctcccggctaattttttgtatttttagtagagacggggcttcaccatgttagccaggatggtctcgatctcctgacctcgtgatccgcctgcctcggcctcccaaagtgatggtatatccagttttaaacaatggatcaaacaatgttaaaaagctaaaactaaaaaaaacagattgcgaatttaaaatgtcattaaatgatgatgacacattgcatacagtacttttgacttttaaataaggaaactttttctacttgaatgtcatctgaagctttccagacttcaatatacagaggcctgaggtgcgtaataaatagaatacctgaaaacataaaaacataccaagcataaatctgaacccttaaatattcattatacataagaaaataaagaaattatccagtatataaaaagaattcctgggaggctgaggcaggagaatggcgtgaacctgggaggcggagcttgcagtgagccgagatcacgccactgcactccagcctgggcgacagagcgagactccgtctcaaaaaaaaaaaaaaaaaaaaaaaaaaaagaattcctgtaactcaataagaaaaaaacagaaaattgggcaaaaacctggaaattatatttcacaaaagaggctattcaaatggacagtataggtgtgaaaaggtgctcaactttattagtcctcaagaaaatgcaaatgagaaaaccataatctgataccactattcatccaacagaaaataataagtgttagctagtacagatgacccttgaacaacatgggggttagtggcaccaaccacctgctctgtcaaaaatatgcatataactcttgaatccccagaaacttaactacaaatagcctcttgttgactgaacgccttaccaataacataaacaattcattaacagatattttgtatgttatatgtattatgtgctgtattcttattaatacaataaagtaagctacagaaaagggagtgttactaagaaaatcataagacagagaaaatatatttaatattcgtaagtggaagtggattatcacaaacgtcttcaccctcatcatcttcacagtgagtaggctgaggaggaggaggaagaggagaggttgttcttgctgtctcaggaatggcagaggtggaagaaaattcccaggatttcttgcccactactgttgagaatgtaaattgatataaccatttggaaaactatttggcagtccctatgaatgtggacatatgtttattctatgtacgacacagcaattttacccctagatatgtaatcaaaagatatgatcaagaatgttcattagaacacaacttgtagcagttaaaaacaaaaaagcaccaaaatgaatatcaacagtagaatggtccataaattgtggcatagttgcacaatttaatattcttcatcagaatgaacaattacaaacaacaacataggtgagtctcacaaacataaaagttaaatgaaagtagctggacacaaaagagtacgtattgtattactccatttatagaaaagttaaaaacagactgaactaatctatcctattagaaggcaagataccaggtaaccctggtggaaggacagtgattagaaggagcaagagcagaacttagggagtttggagatcatcagtttcttgatatgggtgctaattacaccagtgtgttaagctggtgaaaattcagctagctgggccttgtgtgtacttttctgaacatgcattacactttaaaagtttaaaataaaaaaggaagaaacagttaagtctccagccagttatttccttctatttccaattcccttgctgttttataaagttgcatttcaatgttaaaatacttgttctgttttaacaagcagtgggtggttggtgtgatttctctataaatgatttgtataatggtttgggaaacacataaatgttaggggtgtatacaatatttttttctcatagagattatgttattaaatcatagtacttttattcagttttattttttctgtgtagcacagtgcccagaagcactcataatttccatctgcagattataacacaattgactcctgtgaagatcacagctattgaaaacattaaagtaaagcaagaatcagacatagctgccattgttgatcctgaaatattatttgaaataatgaagaaagtctgaggatatctgttattccttcttatattatcactgtttcccattagtagtctatgtctagtagatacagaataactagtgatcaggttttcataaaaatctccattttggaacacaaaccccagcttcctccacgtgagctcacaagtttttgatccagccaaagctcttctcaatattgcagcttcctttgtaaataagtgttcttttacttttcttcacactaacagaggctggattaacattgagggtaaacaacttatcctaataagcagcattgtattattcagaatatggagtatgtggactgtgcaaagccataaaaaatccaaaagaatataaaaattatgaagcgatgagtcaataggcagatgtttgtaaaaagacaaagtaacaaagggcatgcatcaagtagtaaatcgtttgattctgaggtctcataaaaaacaggcagtggggaggtgactcacttgagtgtcccttgatgccaaatacagatagtccccaatagtacaatggttcaactcatgattatttacttttttgacttcaccacagtgtgaaagcaatatgctcagcagtcgagtactcacacaaccattccgtttttcactttcaatacagtactcaataaagtacataaccaatgcttttttataaaatgggtttagtgttagatgattttgcccaactgtaggctactgtaagtgttctgagcacatttaagataggctagactaagctgtaatgtttggtaggttaggtggattaaatgcattttgacctagaatattttcagtttaaggtgggtttatcaggacatagccccattgcaagttgaggagcatttgtatcaggaaagcaacagtttttctaacccataaagtcagaaataaaattactatgttttcaaagttgctatgttttatcttctttggtataatatgaaaatttctatctttttttgtttgtttgcttgtttttgatacggagtctccctctgtcaccaggttggagtgcagtggcatcgatctcggctcattgcaacctccgcctcccgggttcaagcaattctcctgtctcagcctccagagtacttgggactacaggtgcccattaccacacccggctaatttttgaatttttagtagaggtgaggtttcaccatgttggccagaattgtctcaatctcttgacctcgtgatctgcccacctcggcctcccaaagtgctgagattacaggcgtgagccaccaatcccagccgaaaacttctatcttctaaaaaaattattatggcattatgttttgagatgtctcagaaccacaggctaacttttaagatagaatgagaagttaaaatttgtctaaacaaatggccctgaaattgtgcactgaggagcgctgtgggctcctacttggtgtttcaagggggttagaaaaaggacaagagagaatcaatcgggaccctgctaaccccagcacatctttaacaagtagaaatccacttctgttttcataacgggcttctatgtgggctttatttgaggaaagcattcaactatttaaaaagaaacaaaaacttcaaaatagataattcaggcaggatgcagtggctcacgcctgtaatcccaacattatgggaagccaaggcaagtgaataacctgaggtcatgagttcgagaccagcctggccaacatggtgaaaccccccaaaatacaaaaatcagccaggtgtggtggcaggcgcctgtaatcccagctactggggcggctgaggcaggagaatcacttgaccccgggaggtggaggttgcagcgagccaagatcacgccattgcactccagcctgggtaacaaagtaagactccgtctcaaataataaaataaaataaaataaaatagataaatcgtctggtccaaatatcctcgaagctgatacgtgtataattaaggaaactgaggcgtcagcagtttaagtgatttgcctcaaatcttaaagccacccaaggatagaagtaaaactggaatttccactttctgattccaatttgaatgggctctccaaaatatgatgtgtccatcaaagagctcttgcagttccaaaacaaggaattgaaaatcttgagtttgatgttattgaatgcttatttatccaacttatgtagatttttgtttaccttcagtgttaaagtctttgatacagagaccatctgcattttattttattttatgtttgtaaatttttttcactctttgcagaactcaatctaccatctgcatattaataatgtgtggcatgctgcatgaaataatatagataatagaatcaagagtaaattattaacagtccacctcctgtttgcttcaaagtgctatttgcaaatggaaaaataaattagccgctaaaaacattaaattggttacaatcgaatccttcaacagagtaaagctgccatgggaactgactagatgattttaaagctaaaataagccttttcaatacatacttcagttttttacagaaaatatattaggatgtcagttcaaaatgcatatataattagaaatcagctttttctatcatgccagcttactttctgaaaagaatctatcgtaattaatttctttatttgattcggaaaccaaagggttaattaaagatagagacctctatttttagctgttactatagccagactcccattcagtctaaaaacagtcatgtattttacaccatttttaaccctgcaaagctgagactcatgcctacccaaattaaggataagcttaaatagcccatcctcagtcaaaaccatggcaaccagtacacagtacacatcctgcatcttgcccggtagtccttcaaattctttaatcacaagacaggaaatctgttttgtttggatgtcacttaagggcagattaatattacatgatggtcaaccatttgcttttatttaggaaaataaaaacctgtttgatggtgtaagctttacaattagagagagacaagagtgctttttattatttatttgtttactatcttttttcaaaaagatctgtggtaagtcccagaatcccaaaaggagagatgaagaaagtgagaagtattgggttgtgggctttctgcagttatgactgcagaaataactagcttggcagtcagggtaaataagaaaaataaaattggattctgtacagtgacactgccgaagtaccactcttaaactgggcaacatgaagagatctttgatatttctgtcttttgtttcaagttgaaaatagcttcatgatttttttctgattataaagtcaacagatgttcaagtagaccatccatgcactttagaagagtataaagaagaaagcaaacatcagcctaagtcacccaaaggcaactgttaaaatcatggtgactatcatcccaacagcactctgtgcatgtattttttttttttttttttttttgagactgagtttcactcttgtcacccagactggagtgcaatggtgcaatcttggctcactgcaacctccgcctcccgggttcaagcaattctcctgccttagcttcctgagtagctgggactacaggcgcccaccaccacaaccgactaatttttgtatttttagtagagacagggtttcactgtgttggttagactggtcacgaactcctgacctcaggttatccacccacctcggcctcccaaattgttgggattacagacatgacccactgcacctggccacatgcatttcttaataactttatatatatgaaactactctgcatgatgttttgtgactggcttttcccattcaattcattgtgaaggtctttacattccagtcaatatagatttgtcatacactctactgcataggtgtgtcataattaatttaactaatctcctgtttagaaatatgtagggcatttccagcattttgctattatgagcaatactacaaagaagattattttacatgcatgctattgtacaattgaccaactatctccacaggataagtttctagatatgagattgctaaataaaaatatatatatatatttaaatttggtgtccatatcatccagattgtaccctagaagagttaagccaatctatacatccaccagtaaggcatgaagataaagcttttctgcatctttacagatattggttatctcagtctttttatcttttcccatctaatagacaagatgtcattatattttgatagaagcagctatttcccatcaatttataactcctaaaaaaggagaagtgtaattaaattcaatgagatagttgacctagatgattttgaaaggcttttccagttttaacattcaggaattctacaaaaatggtcttaattcatttctctatcaagcatctgctataagcaagtccccagagaaagagaagctaaccttgaacacctaatcaatgtgaaaacaaccctttgagatagttgttttgatgcttattgtatacaggaaaaatatggggattaaataagagcagaatcagagcaggttggttcaactagaaagctgagatttttttctccctatcccttgctgtacctcattgttgtttctgtccttcaggaacatacagtccactccaaggcaaggtaggggttgcaggaaaaaccatattcacataaacataattcaagtctcatcttctgatttctatgttcaggccctggtcttcctccacccactcccgcccactaccatcttgtgctaccacttgagctttcaatattgcacatttaataggtgcttgagaaatattgtccatgttcctcactatccacctatctggctgaggggagggagatttttcttgttgtggacaaggcagtccctactccctgcaccatgtaatagcagcctggcagctagaaagctcttagcctcaggactgaacatgccacttaactgatagcccccatcctcagccaagcctcaccaggcttggagctatgagcccagagaaacagactgaactccagagacagcaagacactcagctccggggcacaagtaagacagattatacttttaaagtttttcttggacttttctaaaaaatctgattaaatcattattattttttatctttgacattttctcttttgccctttgacattcttagagtgtctttagactttgttgagattattatcatcattatcattactattcatcattaaccatggatgtcttagtctgttcaggatactataacaaactgctcttgactgggtggcttataaataacagaaatttatttctcactgttctggagatcaaggtgttggctggtaagggctcacttcctggttcatagactgttgttcctttgctgtgtcttcacatggaggaagaggtgaggcatctctctcggacctcttttgtaaaagcattctcctaatcacctcccaaaggccccattcctaatgccaggtcccagagagatacctcccaataaatgtttttgtcccctccaaaattcacacgttaaatcctaatgcccagtgtgctggcattaggaatgggacagaaacatttagaccacagcaatgagtaattcacatttgctgtagttcaatgttacctgaaaaataacatttaaactactagtactctagttactacattctgagagctagagctgacacattatataacagctcaggaccaagaagttagcgttgaatggttatgttcacatgtggtccaataggtcaaaatgtcattggttgatatgcattcatagtggtgtaggacctagactctacatatccactcttgtatataaatcatttcatgctcattttatatttcacatagtacaaaatagctttttaatttggtttgtgtaaatatatgacgagctgcaattcaatgatttctggagatgaaataccctgaaaacaactggaaagacacatcatttacattgtgaaattcatgtaaacctcacctgataaatgaccacatttccatgcaataattaactgttctatgtgctttgattaggctgggaaaatcttgattttggtgaatgcctatggttcttccaggctgttggataggacaagcccttgattgtggcctacctcactgtaaggttagcctccgtattaaagagaatggccatggtgaggacattgagctacagtgacagcccactcctgggaagaaaagcaggcctattacatttgctgcaataaactcatgctttctaatttgctgtctttttttttttcaaacaaatgtgttattactcaacaacaaagggtctgacaagatcccacagagcttatactacaaagctacataaaagcaggaaatgatgaatgttaagtgcattctgacttgattcggtttaaagagatcacttccaagaaacacttgggatcagtacttgtggtgtaagagatgtgtcctgacagctggggtttattggaacaagtggagctttgttcccttttatgtccatttattcccatgcatttgtcatcagaaactgctcatgcagagggcaaagcagaagattacacagtggagcacccgcaaagaggtgagagattctctccaactaatgctgaggaggagggattcactgtcagttctatttttagtggttgctgctgtgatgatttctagggtgccgagtccagcctgtccctacaaatgaattcacacctgggcatttctatagtttgattttgtttgttccctccaaatctcatgttgaaatttgatacccaatgttagaggtgggggcctaatgagaggtgtttgagtcacgggggcagatccctcataagtggcttggtacagtcctcacggtaatgagtgagttcttactctattagttcctgggagacctggttgttagtggcaacttcccactctatctctcttgttttctctcttgtaatgtgatctctgcacacatcagctctccttcaccttccgtcatgagtagaagcagctgggcccctcaccagaagcagatgccagtgccatgcttcttgtacagcctgcagaacagtaggccaaataatcattctttctttataaattaccagcctcaggtattcctttatagcaacacaaatggactaagacagtcattaatatccatgtatacaacaaatcccataacctcttcttcctttgcacatagctagactctatttgccagcctctcttgaggttatagctaatggaatatgagcagaaatgacatgggccacctccaggcctggcccataaaaacctccttgattaattctccttgctatctcttcccccatctgccagctggatgtccgtgcccaggtaaccatgaagttgtgtttgaataatggtggagcttccataagccagatcctagaatgattacatggaactcaacttatccacccctctacccctgtctattggaatttacataaagaaaatataattgtctatcatataagaccactgaaatatgggcagggaagtgggggaggtctgttacagcagttagcctcccctgactcatacagcattcaagagcccatagaaagagcaggtgatgctctctgaatgcacctactcttgcagcatttctgaccacctttttttaatattcccctctacttgattccaacaactgatactgagctggggaatgatgggggagaagcatgttgggttgctacatactagcatgttgatgtgactttggaaaagaaaatgtgaagacggcaaagaacacacattcctgaggacagaaatgctatcccaaccgacaaatccttgttgggcatgttccctaaaacagtcattctgctaggtgctgggaatacaaaggtatgaaacttcatctccaccttagaatgaaaacaaaaacaaacaaacaaacaaaaagatacagccctattcctcaagcttacaaactatttggggaaacacaacttaaaatacagttgactaatcaaagaggacaagctttacagtcagacagaattaggttgcaatatcaaatatggcacttagtaaatagatggaaaattatttcaacacattgtgcctcagtttcctcatctttaaacttatataatacctgatgtattagtctgttctcacactgctattaaagacatacctgagactgcataatttataaaggaaagaggtttaattgactcacagttccacatggctggggaggcctcacaatcatgactgaaggtgaatgaggagcaaagtcaagccttacatgacagcaggcaagagagcttgtgcaagggaattcctatttataaaaccatcagatcttttgagatttactcactaccatgagaacagtgtgggggaaaccacccccatgatttaattatttccacctggcccctcccttgacatgtggagattatcacaattcaaggtgagatttgggtgaggacaaagtcaaactatatcattctgcccctggcccctcccaaatctcatgtcctcacatttcaaaaccaatcatgtcctccaaacagtcctccaaagtcttaactcatttcagcattgactcgaaagtccacagtccaaagtttcatctgagacaaagcaagtccttttgcctatgggcctgtgaaatcaaaagcaagttagttacttcctagatgcaatgggggtagaggcattgggtaaatacacccattccaaacgggagaaattggccaaaatgaaggggctacaggccccacgcaagttcaaaaacccagtggggcagtcaaaccttaaagctccaaaatgcactcttttgactccatgtctcacatgaaggccacactgttgcaagaggtggattcccatggtgttagacacctgataaacagggttaagctttctaacattttattttgaaataattttaagcttaaagaagagttgcaagagttcccatctacccttccttcacccatcttcccctaactttaacaatttacatagttggttcttattttacagaattgttttgactactctggtttctttacttttccaaataaatttcagaatcaacttgttgatttcttcaaagaagcctacagttgactcttgttttttacccagtctgacaatgtttttcaattagtgttcaaatcattaatatgtaaaatgcatcaaatcaccttcttactagctgttttctatttgtttcatcatttctttgtctcattttttcccccctttttgctgcctattctcagaatcattgagtatatcttaggattccatttgattatctctatagacaatatatataagaatttttaaagaatatttagtgattaccctaggtttacaacacatgcatttaatcagagtctgcctacaaatatattataccactttatttgtagtataaggaatctataacagtatatcctcagtgctttttaactgtgctccacatgaaaatcaggagaggagatctggaaaaaaatgccagtgctcaagcccaacccaaaatgaattcaatcagaatttctgggggtgggagaagcccagatgtagctttcaaaaagctctccaggagattcttctctttttttttttttttttttgagacagggtctcactttgtcacccaggctgaagtgcagtggtgcaatcacggctcactgcagcctcgacctcccaggctctagtgatcctcctgactcagcctcccaagtagaagtagccaggaccacaagcacacaccaccacacctggctaattttcttttttttttttttagtagaaacagagtctcactctgttacccagtctggtctcaaactgccgggctcaagtgatccttccgcctcagcctcccaaactgttgggattacagccacgagccaccactctggccttcaggagattttttttttttttctgaggcagagtttcactcttgtggcccaggctggaatgcaatggcatgatctagactcactgcaacctccgcctcccaggttcaagcaattctcctgcctcagcctcccaagtacctgggatgacaggcatgtaccaccacacccagcaaatttctgtatttctagtagagatgggatttcaccatgttggctagggtggtctcgaactccagacctcaagtgatccgcctgcctcagcctcccaaactattgggattacaggtgtgagccactgcactcgaccccaggagattcattttttttttggagggggcttaggggagacggattctcactctgttgcccaggctggagtgcagtggagcaatctccactcactgcaacctctacctcctggattcaaacaattcttctgcctcagcctcctgagtagctgggattacaggcacccactaccacatccagctaagttttacatttttagtagagacagttttcaccatgttggccatggtgaaaactcctgacctggtctcgaactcctgacctcaggtgatctgcccgcctcgacctcccaaagtgctgggattataggcctgaccatgccccaccggccgagattcttaacaagcaatgagttctggccaccaactcctttaggtcatgggttatcacttggtgtttatatgcaatgtgcagcctgggggtgtgtttaattatgcctgttactgaaaaggcatagtacctgggcagtgaatacacctggtaacaatactattagcacttattgtcctgatacaattatctcaactccctacccacttcggtcttttataatgtctgctttagactgtaaccactagaagacaccaaggagtttgcaaaaaacaaacaaacaataacatcacgtttaatgaaagagtacagaagaagctacttatacattcagtacaagatgccccattccaatcagtgaaggaggtaccagacagaataatttgcttcctcaccctgaaacgtttcactttttataaatgatagtgttaataatttgagtgtttgaacatgatttaaggccatgaataattttctaagaacaaaatatcagtgaaatcactaacactaaatctgccatctttcatagagcagcttgtgatagcacaggtcctaaaataactccaaagttttagagatttggcctttgtcagaacagtaggaaaaagctgtcttttaaaaataccaggcttttcatagaaataaaggactggaagccacattcattgcaatttaactcttttattttaaaggttaggaaactgagactcagagatgtatctattcaaactcatacaaccacttaatactgtaaaagccaaggattttgatctcataattctttactgtgtaatgtgtccatgcaattgccaaacctttagcattattagaacaattattctggataatctcaagagcagagaatataatggggaaaaggcaaccgctaataaaatctgaatatgggtttggctcattttaagtcagtcctccaatttctccaaactataaaaatattcacatataagagtagaaatactgctatattttcagtcccatccaagtaggcattctgtaatgtacatttaagaactattccaagctgtcaataaaagtagtttctaggagactccattttcatagtctagtttgaacactacaaaaagtctgactgtgattggctaggattatgtataactgtaagtaatggaacatttagttctctcttctgaaagtctgaagatagtagcccttctaggttggtatgagcttccatagtatcagggactcagattctgatgtagtttggttctgtgtccccacccaaatctcatctcgagctgttatccccatgtgctgagggagggacctgtaatccccacatatggagggagggaggtgattggattatgggtgacatttcccccatgttgttctcatgatagtgagttacttctcatgagatctgatggttttataaggggctcttcccctttgctcttacttccctctctcgcctgctgctatgtgagacatgcctgcttccccttccgccatgattgcaagtttcccgaggcctccccagccacgaagaattgtgagtcaattaaatctcttttttaaaataaattacccggtatcaggtatttctttatagcagtgtgaaaaccaagggaggcaggtcccaagagaaccattcttttgtaggtgccaacaaaaaggggaaatgtgattccactctctggtttaatgtctacattagtcagtggatctgctcacctgcccctgtgatccaggtggaggggaatgaattaagaagacaaggaatgatggagggtggtaagacagagagaggccacttcctttctttgcatcccttccatagttccagatcccaagaagtacagaaaaggatcccacaggtacttgtaagtctgtgagtctgtggcctacagtctctagctggggattgctgtagcaggggtcaaggaggcaagcacactgaagcagtgggggaatatgcggaccgagggtcttcatttggagtcaaatctcacaacatattaccaacatctggggaagctgcttggggaggctgccatcagaggggcatgctagagccatcgcttgtctacattgaaccctcagacaacaacggtgtcaaccacccatgagagctacgtaaagacaagtcaaataaggagctgggtctttcttgttccttttccttctccagctcagcatcagagaagcaggtgcatggagggaggaagaaggggttatatgaaagcagatcatgccccctcaaatgccagccctggtgcccactggtctagccaatgctgggaggagtgggggagaagagctttggatctgaaaaaaaattaaagtttaaataaacagagctgagtcttaaaaactgaaagtgacttttaattactgaaaatgacaaaaagctaaagaatcaggctgaagtgttataaagagcccctgtcacccagtgaggaggggactgtgttagagcagcgttgaaaatagtggttgggaaaaataagtgttctttgtttttacccgcaaatgaattgagactccttcctcaatgaaccaaatttgtcctttagtcaaaatcacaccagtgaagcagcctatgccaatttgaacagatccttgtctactccctctttcctccatctggaaacagggataccactatactaagcaagtgattcccaaagctaagacttctaagtaccacctacatggcttttgccatattgttataccacctgtactattatttactttatagttttcccttgaatttactcactttaaaaattaaccatatttttaaaagaaactggctcaattataattggaagaacagtacagtattcccttcttagccatgaaaaatgcattccaagatccccaatggatgcctggaaacatggatagtacgaaaccctaaacacacactgtcttttcccatacgtactacctacgatgaagcttaatttatacattagacacaggaatagattaacaacaataacaataaaataggacaaccctaacaatatacagtaacaaaagttatatgaatttaggttctctctctctctgtaaacatctcattgtactgtactcactcttcttgtgatgatgtgagatgatcattgagagggctactaagtgactcattagtgggaagtggagacagcgtggagacactggacaaagggaggattcacatcccacatgggacaaagcaggacagtgcaaggtttcatcatgctattcagaatagcacacaatttataacttagaaagtgtttatttccagaattttccacttaatattgttgaagcatggtcgaccatgggtaactgaaatcttgaaaaccaagcccaattactactgtagaaattgccataaatgagcacaacaaagatgatactctcaaatcttatctaaatactgtggcctgagcccaagctttgatctttgttagaaagggagattagcaagggtgagaggtgctaaagacacactagtaacaaacagagactttctccttgatgtaattagggttgaaagaattgcaaagtgaatgactttcttatggggtaattcaaagttttttaatgctgtgactgagcaataatgtatgaaattaaaaaacctcacctgagaggaagcatgttctgctatataatgatgccagcagtacatacctgcctccaacatcttgctaagcagcttttataactaccagggaacttacactgaaaggtgatgtgctaaaagataagtcttagaatctgagggcatgaagtgctatgggtacatattaaatgctctgacaggtacgattctttcattgcaagcaacagaaaagaatttgttggcttatgatatggtctggctctgtgtccccacccaaatctcatcttgaattgtaacccaaattgtaatccccacgtgttggggaagggacctcgtgggaggtgactgacttgaccagggcagttcctttgtgctgttctcatgatagtgagatctcgtgagatctgatggttttgtaataggcctttccccccttcactctgcacttctctaattcttctccttcctgtctccatgtgaagaaggacgtgtttgcttcctcttcatctgtaattgtaactttcctgaggcctccccagccatgctgaactgtaagtcaattaaaccccttccctttataaattgctcagtctcaggtatgtctttattagcagcgtgagaacaaactaatacagcttatataactggtagggccagaggcagagctcacttcaaccagagttgtatttggatgataaaatagtctcttcaggaggtgttctgagtctctttgtctctctcttccagcttagcagatgcagcagaaaaagtcaatactagaatctctagcagctatgtcccagggaggttgccgataggatggtgtgctgaccagggccccacacccacctggaatgaatgcctgaagccagcttgcctgggagtgttctcctggatcccattcccatttcctgtgataatagagagctagaagaaaagaagggactgggaaggagggaagatcaagacctaggatgaatttcccacaggaagacaagggaaaaggtgctaggcagtcaaaaacaagtgttcacaacaaatgccttctctgcaccaggcatagccaatatgaaaataacctaaaaggtcacttaatgatattttaaattacaaagagtaaatgtgtgtttaatggtccctgttgcctgggcagcagacaccgctgatgctcagcccacatctcctcagcccttaccactttattggatgccaatcccaacttcaacagccagtgtgtgcaccttactgcttacagctttctctgaacatggaaacttacttacatgccaatagggcaagtcagaaggccagggaattagccacctaaggcccttacagcccttagacaagtacagttgttagatggtggatcaatgccctagcttccccacccctggggtaggataactgctgagttctgtactgtttcccagctccttcctggtgggattgagttccagttacccacagtggtaacttgcttgatagcattccttttttggcttccttctcttctctctctcacttccatgtcccccttctagtgtttatttggaccatctcctaaataaactacttgtacttgaattcttgttccagaggaacccaaactatgacagccaaaagtagtggtaagttatttaaatgtattacctcctgtcattctcttaacaatcacatgaattgtacactattattatgctattttgcagataaagaaatgaggcccttagtaaaggccacactgctggggaaaagcacagctagaattcaaagcaggttgactccaacacacacttaacaatggctgctgtgcttcctgacactttacaatatccctatagacccccagcttccagtgattctattcaaagcaggtaaatcccagagcatcactgaaggggatgtaaatgaactggagaaagtactgttgttccgtagaatcccagggggaaacgtgacccaagtagccttgcacgtagtaggtgccccttaatatttattgaaataacatgtggcagtatttactttacaaaacatcattagtgttattctttatgctatccttgaaaaagggaagctttctgagggataattctccagtaaaatgtttctaaatcaatacaaatgacagtccccctggattacgataaagtaatcatctccagagtagaagaaaattggactcaaccgtgttcagaataatacatgttgctcttttacaaaaaaaatgtataacttcaaaatatacatattcttacttatctaggacagcttaggtacaggtttgcctaagaccaaagactgaagcaaattctcattgatcttttccattttatacatccccaattgcatatgaaaatcatttttctattattttaggtagcacatgcataagagagtgaacacgcctaaggacaagtcactgaaataattgtcttcctgcctatttcctgatttagtggaatgagcacgaaatcaagagtcataaagaccaattgtgtgggctaattacttatcttttctgggctccatagctttttctgcaaaattagaacttttgcttagcaatcaccagcatcctcctagcccctaaattttctgacaaacaagggaaaatatttgcttacctccagccttgtgtacaaactgaattaaagagtgtcggaacatcacttcttctaccttgttcagatattgtacagaaacattcactctgcatcttataaataacacagaggaagtctttctgtacccagatcaccaccaaactttctatcttgactgtgctttcactgtgggaaatattaatagctcctgtgttcattgtgacctcaatgttatcataatctcaggttgcctataggtataaacttcagtgaatacttaacgttacagaatgataggctgttttcataacacattttcacactgttggataatttagattttgtttaaaaacataatgaacactaagaagttgtttgcagacaaggaaatggaagacttcaaagaggataagagaaatctcacatttaattcaattaagtcagagaatgaacatgtctaaggatgtcaagaaccaccctcccacctccattttctaagattacttactcaaatattctaaagaaataattaatttagtctaaattaaatctaagtttctaatagtgttcttcaaatacttcaaactactaggtagaaccaagtgatattgtctaattgacaattttttatttataaaacagcaatttcatgtcattcaatctaataatttagagtgtttctgtatattgcaggcagacatctaacaagacaaagaactaaagtgtgactggagtggagactgaaatcccttagaaagactaggcaaagtatcaataaagaatggttttcattggtagcttacataaatcatggcttttaaaaattgatttgtgcgtggcagtttgtgaatagtagatgcacttataagagcttttcaaaaattctttaactgttaaaacttcagattctatttttttaagtggaaaagatattatcaggatagatgaacagattggttaagctttttgttttgctttgtttttcatggtgaagccacttgtaaacagagaatgcattcggtggagattatcaaagctttagggtgagcatcctcccaaatgtactgttgtggagattgattgacagtggaagaatagatggaatgctcttcttaagctatggggacaggttacctagtaaccactgaatgattaagttctgttcacagagacttgttctgttaattggacgaaaagatttaaagagcgcagctggggagaaatggaaagatggaggaccgtggccattattagtggacctgaccagcagccttagccaaattgtcacaatatgagtgaatcttctgttagtacaaagaagtcagtgaagctacctacagagtcacaattttgtgcactttttaactgtaggaaaaatgaaaataaggtgtggaattacacatattaaaaagtgcagtgaaaactgtgcggtgttatagttctgagaatgatcattttctgtggacaagattatatttgtgttcagatatcagagttctattatttaagagaactcaaaataggcacttggggtcagtatatcctatcacaactctcttcggtctaataccatcaggcacatactgctttatagagaattgtggtcacctctgttctctcctgcttttaacaataaaattaagaaaagtcaaggtatagattggtaataatgacatttttcattcattaaggattaagaaaaagcaaggtatagtttggtaataatgacattttttattcattaaggatttttagatgatagagtactttttgcctatgctcaaaaaagaactcagtatttatattttagaaaggaaaaagtatctaagacaagtctcaatcaatttagagatttattttgccaaggttaagggtcatgacctatgacacagcctcaggaggtcctaaggacatgtgcccaaggtggctgggttatagcttgattttatgcattttagggagacagaagttacaggtaaagacataaatcaatacatgtaaggtatatattggtgtagccaggaaaggtgggacatcttgaaggtgggggttaggcttctaagtcataggtggatttaaaattttcctgattggcaattggttgaaaggggtaagctctgcctgaagagttgaaatcagcttgagtgaaggtaactggggaggggtgggttgtggaaaccaaggtttttgtcatgtagatgaagcctccaagtaggagaattcagagacaatagatgtgaatgtttcctatggaactttaaaggtcggtcagactattcagaaagacctagtaaaggaaggagattctctacagaatgcaaatttccctcacaagagacagctttgcaggaccatctcaaaatatatcaaataaatatattttggggtaaaatactttcgctttcttcagggcctactatctgtcacgtgatgctatactagagtctgtttggaacttgctggcttattgctacagagcctgttctgtcagtcttagaattcctgttttcatattaatgctggtcagttgtgcctgaacttcaaagggaggcgggtataatgaatatgtcctaccttccccttcctgtgatggcctgaactggtttttcagattcctttgggtccccttggctaagaggaggatccattcagtcagttggggggacttagaattttcttttggtttaccatatatatatgtatgtatatgtacacatatattatctaattggagaagctctaccttggagcagagcttttttgtctgcttgggtttttttttaatttttaatttttgtgggtacatgataggtacatgtatttatgagttgcatgagatattttgatacaggcaagcaatggataataatcacttaagagtgaatgggatatacatctgctcaagcacttttcctttatgttacaaataatccaattatactcttttcattgtaaaacaaaaagtatctgaggcaggtctcaatcaatttagaaagtttattttgccaaggttaaggacgtgggcctgggaagctgcacctgggaaacagatctgtgcttttctccaaagatgattttgagggttttgatattttaaaggggaaagaggaagaaatttttaaaaggtgtagatagatgagacaagtggttgcattcttctgaatctttgatcagcctgtcgtcaattacaaaatgtacatgtgagggggatagaagaataatcccttatgccttctctagctcagtgatctgcatttttacatcagaggaagcaatcagatattcacatgtctcagaggagcagagggatgacttagagttctgtcctttgtcctgtacctgggaagataagctattatttacattgttgggataaaattcaacagagctattttagggtaaagatcttgggccccacaaggaatttcccagtggacaaattgtgaggcaggtgtgttagcttttttatctttgtagctgtcttatttaggaataaattgggaggcaggtttgcctgatgcagtttccagcttgagtcttccctttggcttagtgattttggggtactgagatttactttcctttcacataattattttaaaatgtacaattaaattattttttactatagtcacccttttgtgctagcaaatatggggccttattcattctttctaactattttttgtactcattaaccatccccacttccccttctaaccctgttactcttcccagtctctggtaaccatccttatactctctgtctccatgagttcaattgttttgatttttagatcataaataagtaaaaatatatgaagtttgtctttcggtgcctggtgtatttcagttaatataatgatgtccagttctatccatgttgttgcaaataacaaaatctcattcttttttatgactgaatagcactgcattgtgtatatgtacattttctttatccagtcatctttttgttgttgttgagacagagtctcgctctgtcacccaggctggagtacagtggtgcgatctcagttcactgcaaccaccacctcctgggttcaagcaattctcctgcctcagcctcctgagtagctgggattacaggtacctgccaccacccacagctattttgtgtgtgtgtgtgtttatatttttagtagagacagggtttcaccatgttgatcaggttggtttcgaactcctgacctcaagtgatctgcccatctaggactccaaagtgctgggattacaggcatgagccaccatgcccggcctatccattcatcttttgatggacacttaagttgtttccaaatcttggctattgtacatagtacttcaacaaacttcagagtgcagatatctcctcgatatcctgacttcctttcttttgggtatatatgctgcagtgggattgctgatttatatggtagcagtacttttagttttttgatgaatgtccaaactgttcttcatagaggctgtactaatttacattcccaccaataaggtacaagggatccctttactccacctccttgccagcatatgtcactacctatctttcagataaaagccattttaactgaggtgagataatagctcattacagttttgacttgcatttctctgatgattagtgatgttgagcacactttgtttaacttttattttaagttcaggggtacatgtgcaggaatcataggtttgttacataggcacacgtgcatcatggggtttgttgtaccaattatttcatcacccaggtattaagctgagtatccttagttatttttcctgatcctctccctcctccctgcctccaccctccaataagccctggtatgtgttgttcccctctatgggtccatgtgttatcatttagctcctacttataagtgagaagatgtgatatttgtttttctgttcttgcattagtttgctaaggataatggcctctagctccatctatgtccctacaaacgacatcatcttgttcttttttatggctgcatagtattccatggtgtacatgtccacattctttatacagtctatcactgataggcatttgggttgattccatctctttgctatcatgaatagtgctgcaataaacatatgcatgcatgtatctttataatagaatgacttatattcctttgggtatatacctagtaatgatattgctgggttgaatggtgtttctgactttagatctttgaggaatctccacactgtcttccagaatggttgaactcatttacactcccaccaacagtgtacaagtgttcctttttctctacaacctcactggcatctgttattttttgactttctaataatcaccattctgactggtgtgagatgttatctcattgtggttttgaattgatttgcatttctctaatgatcagtgatgttgagatttttttcatatgcttgttgaccacatgaatgccttcttttgagaagtatctgttcatgtcttttgcccactttttaatgaggttctttgtttttttcttgtaaatttgtttaaatttctaatagatgctgaatactagatctttgtcagatgcatagtttgcaaaaatttcctgtcattctgtaggttgcttgtttaccctgttgataatttcttttgctgtgcagaagctctttaattagattacttttgtcaatttttgcttttgttgcaattgcttctagtgtctttgatgaaatctttgcccagagtatactttcatatacctgtttgccatttgtatgtcttcttttgagaaatgcctattcagatattctgcacactttttaattagtttattagatttttctttcttattgagttgtttgaactccttagatattctagttgttaatccgttgtcagaggaatagtgtgcaaatcttttctcccattctgtgggttgtctcttcactttattttttcctttgctgtgcagaagctttataacttgatgtaatcccatttgtctatatttgctttggttgcctgtgctaatggggtattgcccaaaaagtctttgcccagaccaatgtcctggtgtttccccaatgttttcttgtagtagtttcatagtttgaggtgttagatttattacttaaatgcattttgacttgattttgttatatggtgagagatagatgtttagtttctgcatatggataacctgttttcccagaaccatttattgaagagactgtcaatttcccaatgcgtgttcttgaaacctttgttgaaaatgagttagcataaacgtatggatttatttctgggctcttcattctgttccaccagtctatgtgtctgtttttatgccagaatcatgctattttggttactatagctctgtagtataatttgaagtcagattatatgattgctccagttttgctctttttgcttaggatagctctggctattctgggtcttttgtggttgcatatacattttaggatcgttttttcatttatgtgaagaatgtcattggtattttgatagagattgtattgaatctgtagattgttttcggtagtatagacattttaacaacatcaatttttccaatccatgaacatggaatatcttttcattttctcatgtcctcctcaatttctttcatcaatttcttttatagttttcactacagagatctttcagttctttggataaattaattgctagatattgtattttatttgtagctattgtaattggtatttataagctattgtaatattgacttgcaaaaattagcctgtaagtactagacagatgattggcaagatggccaaataggaacagctccagtctgcagcttccagccagaccaatgcagaaggtgggtgatttctgcatttccaactgaagtacccagttcatctcattggaactggttagactgtgggtgcagcccacagagagcaagcagaagaaagatggggcattgcctcatccagggagcacaagaggttggagaacttcctcccctgaccaagggaagccatgagggactctgctgtgagggacagtgctatcaagcccagatacaacgcttttcccatggtcttcacaacccacagaccaggagattcccttgggtgcctataccaccagggccctgggtttcaagcacaaaactgggtggccatttgggcagacactgagctagctgcaggagtttttttttttgtttgttttgttttgtttttgtaccgcagtggtgcctggaatgccagcgagacagaaccgttcactcctctggaaaaggggctgaagccagggaggcaagtggtcttgctcagcatatcccatcctacagagcccaacaagctaagatccactggcttgaaattctccctgccagcacagcagtctaaagtcgacctgggatgctccagcttgatgaggggaggggcatctgccattactgaggcttaagtaggtggtttgcccctcacagtgtaaacaaagctgccaggaagttcggactgggcagagcccaccacaatgccaaaaagccactgcagcagactgcctctctggattcctcctctctggataaggcatctctgaacaaaaggcagcagcctcagtcaggggcttatagataaaactcccatctccctgggacagagcaactgagggaagaggcggttgtgggcacagcttcaacagacttcaacattcctgtctgccagctctgaagcgagcagcagatctcccagcacagcacttgagctctgctaagggacagactgccttctcaagtgggtccctaatcctagtgcctcctgacagagagacaccttccagcaggggtcaacagacacctcatacaggagagctccagctggcatctggcaggtgcccctctgggacaaagcttccagaggaaggagaaggcagcaatctttgctgttctgcagcctccactggtgatacccaggcaaacaagatctggagtggacctccagaaaactccagaaggcctgcagaagaggggactgaccgttagaaggaaaactaatacaaagaaagcaatagcgtcaacatcaacaaaaagaacgaccactgaaaaaccccatgcgaaggtcaccgacagcaaagactaaaggtagataaatctatgaagatgaggaaaaaccactgcaaaagggctgaaaattccaaaaaccagaatgcctcttctcctccaaaagatcacaactctttgccagcaaaggaacaaaattggacaaagaatgagtttcacaaattgacagaagtaggcttcagaaggtgggtaataacaaactcctctgagctaaaggagcatgttctaaaccactgcaaggaagctaagaatgctgataaaaggttagaggaattgctaactagaataatcagtttagagacgaacataaatgacctgatgagctgaaaaacacagcacgagaacttcatgaagtatacacaagtatcaatagctgaattgatcaagcagaagaaaggatatcagagattgaagaataacttatgaaataaagtgtgaagacaagattacaaaaaaaaaaaaagaatgaaaactaacaaacaaagcctccaagaaatatgggactatgtgaaaagaccaaatctacgtttgattggactacctgaaagtgacaggaagaatggaaccaagttggaaaacacacttcaggatattatccaggagaacttttgcaacctagcaaaacaggccaacattcaaatttgggaaatacagagaacaccacaaagatactcctcgagaagagcaaccccaagacacataatcatcagattcaccaaggttgaaaggaaggaaaaaatattaagggcagccagagacaaaggccgggatatccacaaagagaagcccatcagactaacaacagatcattctgcagaaatgctacaagccagaggagagtgggggtcaatattcttaaagaaaggaattttcaacccagaatttcatatccagccaaactaagctccatatatgaaggaaaaataaaatcctttacagacaagcaaatgctgagagactttttcaccaccaagcctgccttacaagagctcctgaaggatgcactaaatagagaaagaaaaaccgttaccatccactgcaaaaacataccaaaatgtaaagaccatcgacactatgaagaaactgcatcaactaacgggcaaaataaccagctagtgtcataatgaaaagatcaaattcacaaataaaaatattaaccttatatgtaaacaggctaaatgccccaattaaaagacacagacttgcaaattggataaagagtcgaggcccttttggtgtgttgtactcaggaggcccatctcacgtccaaagacacaaataggctcaaaataaagggatggaggaagatttaccaagcaaatggaaagcaaaaaaagcaggggttgccatcctagtctctgataaaacagactttaaaccaacaaagataaaaaaagacaaagaagggcattacataatggtaaagggatcaatgaaacaaaaataaagctaactatcctatatacatacacacccaatacagaagcacccagattcataaagcaagttcttagagacctacaaagagacttagactcccacacaataatagtgggagactttagcaccccactgtcaatattagacagatccaggaggcagaaaattaacaaggatattccggacttgaacacggctctgaaccaagcagacctaatagacatctacaaaactctccatcccaaatcaacagaatatacattcttctcagcaccacatagcacttatttttaaattgaccacataattggaagtaaaacactccttagcaaatgcaaaagaatggaaatcataacaaacactctctcagaccacagtgcaatcaaattggaactcaggattaagaaactcactcaaagccacacaactacggggaaactgaacaacctgctcctgaatgactactgagtaaataatgaaattaaggcagaaataaagaagttctttgaaaccaatgagaacaaagacacaatgtatcagaatctctgggacacagataaagcagtgtttagagggaaatttatggcactaaatgcccacagaagaaagcaggaaagatctaaaatcaacaccctaacatcacaaaaagaactagagaagcaagagcaaacaaactcaaaagctagcagaagacaagaaataactaagatcagagcagaaatgaaggcgatacagacacaaaaaaaccttcaaaaaaatcagtgaatccaagagctggtttttttgcaaagattaacaaaatagatagaccactagccagattaataaagaagaaaagagggaagaatcaaatagatacaagaaaagatgataaaggggatataaccactgatcccacagaaacacaaactaccatcagagaatactataaacacatctatgcaaataaactagaaaatctagaagaaatggataaattcctggacacatacacccccccaagactaaaccaggaagaagtcgaattcctgaatagaccaataagaagttctgaaattgaggcagtaattaatagcttaccaaccaaaaaaaagctcaggactagatggattcacagctgaatcctaccagaggtacaaagaggaactggtaccattcctactgaaaatattccaaacaacagaaaaacagggactcctccctaactcattttatgaggccagcaccatcctgataccaaaacctggcagagacataacaaaaaaaaagacaatttcaggccaatatccctgatgaacattgatgcgaaaatcctcaataaaatactagcaaactgaatcaagcagcacattaaaaagcttatccaccacaatcaagtcggcttcatccctgggatgcaagctcattcaacatacccaaatcaataaatgtaattcatcacataaacagaaccaatgacaaaaaccacaggattatctcaatagatgcagaaaaggccttcgacaaaattcaacagcgcttcatgctaaaaactctcaataaactaggtgttgatgggacatatctcaaaataataaaagctatttatgacaaacccacatccaatatcatactgaaagggcaaaagctggaagcattccctttgaaaactggcacaagacaaggatgccctctctcaccactgctattcaacatagtattggaagctctggccaaggcaatcaggcaagagaaagaaataaagcgtattcaaataggaagagaggaagtcaagttatctctgtttgcagatgacatgattgtatatttagaaaaccccactgtctcagccctaaaactcctaagctgataagcaacttcagcaaagtctctggatacaaaatcaatgtgcaaaaatcacaagccttcctatacaccaataatagacaaacagagagccaaatcatgagtgaactcccattcacaaatgccacaaagagtacaaaatacttacgaatacaacttacaagggatgtgaaggacctcttcaaggagaactacaaaccactgctcaagcaaataagagaggacacaaacaaatggaaaaccattacatgctcatggataggaagaatcaatattgtgaaaatggccatactgcccaaaatagtttatggattcaatgctatccccatcaaactaccattgactttcttcacagaattagaaaatactactttaaatttcatatggaactaaaaaacagcccatatagttgagacaatcttaagcaaaaagaacaaagctggaggcatcatgctacctgacctcaaactatactacagggctacaataaccaaaacagtatggtactggtaccaaaacaggtaaatagaccaatggaacacaatagaggcctcagaaataacgccacacatatacaataatctgatctttgacaaacctgacaaaagcaaccactgaggaaaggattccctatttaataaacggtgtggggagaactagctagccatatgcagaaaactgaaactggaccccttccttacaccttatacaaaaattaactcaaggtggattaaagatttaaacgtaagacctaaaaccataaaaaccctagaagaaaacctaggcaataccattcaggacacaggcatggacaaagatttcatggctaaaataccaaaagcaatggcaacaaaagcccaaattgacaaataggatctactaaagagcttctgcacagcaaaataaactatcctcagagtgaagaggcaacatacatattgggagaaaaattttgcaatctatccatctgacaaaaggctaatatccagaatctacaaggaacttaaacaaatttacaagaaaaaaacaatcccatcaaaaagtgggcaaaggatatgaacagacacttttcaaaagacatttatgcagccaacaaatacatgaaaaaaagctaatcatcactggtcattagaaatgcaaatcaaaaccacaatgagataccatctcatgccagttagaatggtgatcattaaaaagtcaggaaacaacagatgctggagaggatgtggagaaataggaatgcttttacactgttggtgggagtataaatgacttcagccatttgtgtgtggcaattcctcaaggatctagaaccagaaataccatttgacccagcaatctcattactgggtatatacccaaaggattataaatcatcctactataaagacacatgcacacgtttgtttactgtagcactattcacaacagcaaagacttggaaccaacccaaatgcccatcaatgatagactggataaagaaaatgtgacacatatacaccatggaatactatgcagccataaaaaatgatgagttcatgtcctttgcaggaatatggatgaagctggaaaccatcattctcagcaaactaacacaggaacagaaaaccaaacactgcatgttctcactcataaataggagtctgcatgttctcactcataaataggagtcaaataatgagaacacatggacacagggaggggaatatcacacaccagggactgtcagggcatgggtgacaaggggagggatagcattaggagaaataccaaatgtagatgacgggttaatgggtggagcaaaccaccatggcatatgtatacctctgtaacaaacctgcacgttctgcacatgtatcccagaagttaaagtataatttaaaaaattagcctgtaaaaatttacaatctattgtaaatgggatttcttgatttcttttttggattgttcactgttggcatatagaaatgctactgacttttgtatgttgattttgtatcctacaaatttactgaatatatatatctcagttctaatagtttttttattcagtctttagatttttccaaatataagatcatatcatctgcaaacaaggataatttgatttcctttccaatttagatgccctgtatttctttttcttgtctgatcactctagctaggacttctagaattatgttgaataacagtggtgaaagtgggcatccttgtcatgttccagattgtacagaaaatgctttcagtttttccccattcagcatactagctgtctgtcagtcatatattgctttcattatgttaaagtatgtttcttctacaccaagttttttgaagacttttaccatgaagtgatgttgaattttttcaaatgctttttcagcatcaatttaaatgatcatatggtttttgtccttcattctgttgatatgatgtatcacattggttgatttgtgtatgttgaaccatccttgcatcccagggatatatcccacttggtcatggttaataatatttgtaatatgttgttgaatttaatttactagcattttgttgaagatttttgcattaatattcttcagagatattggcctggagttttctttctttgatttatctttgttattggaatcagagtaagactggccttgtagaatgagtttgcaagtatttcctccaccttgattttttggaaataatttgaataaaattggcatttgttcttctttaaatgtttgctggaattcagcagtgaaaccatcaagtcctgggcttttctttactgggagaccttttttttttttgagatggagtctcactctgttgcccaggctggagtgcagtggcacgatcttggctcactgaagccttcgcctcccaggttcaagtgattcttctgcctcagcctcctgagtagctgggattacaggcatgcacaatcatgcccagctaatttttgtgtttttggtacagacagggtttcaccatgttagccaggctggtcttgaactcctgacctcaggtgatccactcgcctcagcctcccaaagtgctgggattacaggcatgagccaccacgcccagccagactttttattaaggctttgatctcattacttgttatttgtctgttaaggttttggatttcttcatgattcaatcttggtaggtagtctatatctaggaatttatccatttctactagattttccaatttattgacttatagttgctcatagtagcctgtaatgatcttttgaatttctccagtatctgttgtaatgtcacctttttcatttctaattttatccatcttctgttttttcttacatgtttgactaaaagtttctcaattttatcttttcaaaaaaatcaactatttcattgatcttttgtattttttccttaaatttccatttcatttatttctgttctgatttgtattgtttcttctcttctactacttttgggttagatttgctcttgcatttctatttaagatgcattattaggttatttgaagtttttcctcttttttgatgtaggtgcttataactataaacatccctgttagtagcactttcattgtgtcttgtaggttttagcatattgtggactattatcatttgttttaagaaatttttcaatttccttcttaatctcttttttgacccactggtcattcaaaagcatattatttaattttcatgtatttatatggtttccaaaattcctcttgttattgatttctagttttatttcattgtggccacagaagatatcatttcaacttttcaaatgttttaagacttgttttgtgacctaatatatggtctgtccttcagagtgatccatgtgatgaagaaaaaaaaatctgtgttctacagccattggataacatgttctgtacatatctgttaggcccatttggtctatagcacagattaaatatgtttttgattttttttttttttttgtctggaagatctgtctagtgctgaaagtgaggtgttgaagtctccagctactattgtattggaggctatctatctctttaatactagtaatatttgctttatatatctgggcactacagtgttgggggcatatatgtttacaactgttacatcgtctcgctgaattgacccctttattattatataatggccttctttgtctcttcttaagtttttgtcttaaaatctattttgtctgatataagtatagctacttctgctcttttttggtttccattgacatggagaatctttttccatcactttatttttagtttttgtgtgtcattataggtgaagtgtgtttcttgcagccacagataattgggtcttatttttttttttatccattcagccagtctatgttttttgattggaaagtttagaccttttacattcaatgttattattgacaagtaaggagttactcctctcattttgctatttattttctgattgttctgtggtctttgctcccttctttccttccttcctgtctcccttttagtgaaggtaatttattttctctggtggtagtatttaatttcttgctttctattttttgtgtatctgttgtatgttttttgatttgaggttaccatgaggcttgcaaatattatcttgtatttattatcattaattattttaagctaataacactgcttgcataaactaacaagcaaaaaaaaaccaataaaaattctacactttaacttcatcccccagctttttaactttctgttgtatctatttatatcttattgtacagtctatgtcttgaaaagttgtaattattatttttgatttcatcttttagtctttctacttaagggtactttccactctacagttacagtgtcataattttctgtgttttcctgtatattgactactaccagtgagttttgtcccttcggatgatttcttattgctcattaatgcccatttcttcctgattgaggtgctctctttaggggagtacttgtaagacaagtcttgtgttgatgaaatccctcagcttttgtttatctggcaaggtctttatttctccttcatgtctgaagaatattttcactggatatactattctcgggtaaaagtcttttgtcttcagcactttaaatatgtcatgccactctctcctggcctgtaaggtttccactgaaaagtctgctgccagatgtattggagctctagtgtatgttacttgtttctttttcgtgctgcttttaggattctttctttatccttgacctttgggggtttgattattatatgccttgatgtagctttctttggattaaatctgcttggtgttctgtagccttcttgtacttggatagtgacatctttctctaagtttcaaaagttctcttttattatttattcaaataaactttctatccctatctctttttctacctcaactttaaggccaataactcttagattttcccttttgaggctattttctagatcttgtaagcatgtttcattgtttttttattcttttttcttttgtctcttctgactgtgtattttcaaatagcctgtcttcaagctctctaattctttcttctgctcgatcaattctgctattaagatactctgatgcattcttcatcagctgtgtagcctggggttggtgaggcgggacaaagagggagaggtgcaagcactcttagcttccccagctggtatcttaataggtcacacgtcccaccctccaactcaatctactggctttgagcccagctcaataccaggacttgcataagaattgcagttcttgtggcctaaactgcccctcaagttcacttagggccccagtgcctccagcccacagtggcaagccttgccagaactcaagctccaattgctggaatgggcaattaccctctgccttgggccggtccaaatgccccctccatgggcaggcatcagctgagtacagctcagtttgctttctgctgtgatggggcagcactgagtctaatgcaaagcctcatgaccgctgtgctccccctctctgaagcacagagattctctccaacagggagctgctgctggggaatgggggaggagacagggatggcatcagcaatttaagactgtctttcctaccctctttggtgcctctttcagtcatgtgaaatcaaagccaggcactgagagtgctcccttgatttttggttcctatgaagattactccctttgtgtagacagttgtcaagctaggtgttcctgagaaggaatgattggcagagccttctattcggctatctcactccgcccctcccctggaatcactttttaaaatgtttgtcagttgcacgttacattgcttgaataagatttgtaggtaatattgccttagcatggctgctttcctcacagggatggagcttaaaactttcctaaagccccctctagtgacaaacagcaaattattatccattatttcatacctccaagctctaaatacctccaagctctaaagttccattttctcatttagttattagatgaatcaattgctacattatttcaattagagaatgactgagaaatagttaatagctcaaattctcaagcattcttaaatcactgaaacctaagcaattttgttttgagactgaggtcagcacagtgcacatttaactctataattttactctgccctcatacatataatttttaaggattccctaaatttccttcatttttgtctttcaggaactttaagggttaaaatatgttcgcaataactcaataaatagaaaaatgttgttttgaactttggcttcttgttgttttcactgtatttactggaacattttctaaacacacaaatataaattccaggaatcctctgaattatgaaactaagggtcatccataaagacatagattaaatatataataataacataatgcttaaaataataatatataataaaacagaataaacaataaactatatattatttgcataactataggttatggtattaaaatatatagtttatttcacttatataaaattgaaatatattgtatatttcaaatatataaaagcccatttccaaagggcttagagctcatccaataagacaggcctaattaaaccattaaaagaagaagtcatattcctaataaagggaattaacgagataaatttttaaaaggctatgaatatttatttcaactgagcacaaatcttagttttgaggttcctgtaagctaatacaaaaaaagaaacccagtaattgattagttcatgccaattcattaagggaaacaaagtatttccgtctaaaacacacatatgggtcaggcacagtggctcatgcctgtaatcccagaactttaggaggctatggcaggtggatcactttaggcctggagtttcagaccagcctggccaacatggcaaaaccctgtctctactaaaaatacaaaaattagccaggcatggtggctcacgcctgtaatccagcactttgggaggctgaggcgggtggattgcctgagctcaggagttcaagaccagcctgagcaacacagcgaaaccccgtctctactaaaatacaaaagaaattagctgggtgtggtggcatgcacctgtagtcccaattactcggcaggctgaggcaggaggattgcttgaatccgggaggcggaggttgcagtgagtcaagatcacaccaccgcactccgcctgagcgatggagcgagatttcgtctctacaaaaataaataaataaataaacaaacaaaaacacatatgcagatttctaaatgtcaataacaagattatagcattggaataatttcagaacatgaaattcaggtgtaaacatatatattcaacaaaaggtcttcagaatgcctactctccaaggccattgcagctggtgatgattttcccaatagaagggtgtttcttgggagctcaccctataataaactcataccagctgtatccatcacccatgatcatgaattatttcctgggaatagcaaccagaaagaatcttctctcttgtttacatacatagagccaaagcaaaggacaaattaaattgcacttaggataacatgttcattgctaaaatttgagagacatagaccctattatgcacacattcttgaaataattggaacaaaatattgaaagggaaataatgaaatagatggcttcagacaaagttgggtaccagacaatatggtctccagaagtttctcccattctgctgccctctccagatcacgcacccccccgttctacttgaaaacaaaatctacttgtcatcctaaagtctacttttctaagaggagctggtatcaccttccctgagtcaagtcactgtgttgcttatcccaagggtgtttgccttgggttccttgtttctaattcaatttaacaaatgcttactggaggcctattatatgcaaagtatttgctagctgccagtagtgaaataaaggccttcatgatcttagaaatggatttcaggcaataatgagtacctaggaaggagtttttgttctctgcatgatatgatttggctctgtgtccccctccaaatttcatgttgaactgtaatccccatgttgggggaggtacctagtgagaggtaattggatcatgggggtggattttccccttgtcgttctcatgatagtgagttctcatgagatatgtttgttaaaacatgtgtagcactttcctcttcgctctctctccctcctactctgccatgtgaagaagctacttgcttcccctttgcccttccaccatgatagtgtttcctgaggcctccccagccatgctttctgtacagcctatggaactgtgagtcaattaaacctcttttcttcataaattacccagtctcaggtagttctttacagtaatgtgagaatgaactaatagactgcataacatctgactccctgcccctgtatccttccaaattacttttgttgttggggccacagagccatcacacacacttcaacatgcctccaattttgaatcattgtctgcctaccctgggttttaggaaaacaggggttcaagcgttattataaccgggtttctgatttatttctccttccttgttacagagtttctgacttactccctcaagcctgaattccctgatacccagctctgctgagataggaatctcagaagagagaaagctaacatttattgaatacattcttttatttgccaggcactgttaattcttttaactataaaattagtagcatcattttttcatcccaagcaacagagaggtagactgttgatgaaaagagtcaaactctgtaaaatatttttagagatttattctgagccaaatatgagtgaccctcaggaggtcctgagaacatgtgcccaaagtggttgaggtgcagcttggttttatacattttagggaggcatgagacatcaatcaaataagaaatacattggtttggttcagaaaggtgggacaactcaatgagtatgtaaatttaaacatttcctggttgacaattggttgagtttatctgaaggcctgggatcaataaaaaggaaatgttggggttaagataaaagattgtggagaccaagtttattgtgcagaggaagctctcagtatagcagacctcagagagagagcagattgtaaaatttgtcttgtcggacctaaaagggtgcctggctcttagttggttatctcctggatttggaaaggaaagaaggaaaacaaaggggaaaagagattctctatagaatgtggttttttcccacaagagattttgcagggcaatttcaagatatggcaaggaaatatatcttggggttaaatattttgatttttttttccttgtctcataatattatgccagaatcagattggaaagtaagtcatggtatatagagtcaaataaaacccatctgataagaatttatggtttctagggcatgactccctagacaccttagataggaatttgggcaagataaaaaaattagagcttagtcctcaactctacagaagaaaatgacatttacccaggaatgggcattgcaataggaatatgcgtgccatggcaaactgtttgcatattcaaggaattaaaggaaaaaaaagtttttttaaaaaataaaaaaaggagaggattacataattgttttgaggtaattagccttggctccaagcatcaataacaagggtgatgtcagttcaaggttggacagacaattgctggacagatgtcctcatagaagtatctttttgggtaaggtggaggtctttgtgcaaggttgtggttttcgcagtattttgtgatagttttattatcaggcattcatggatgagaactctccttcatggccttctccagttccacttgtcaggttttctaacacatgtgactctatttttgattctgacaactttcacaatctacattagaaaagagaaaactggggctcagaaagttttagaaactaattcaagatcaagctggtaagtagcaaaaaatttagaattaagttctacatatctggttccaaaaccaggactcttttcattacagcagtggttctcaacagagttgcgattttgccccccagggaatatttcacaatgtctggagacatttatgactgtcaggattggaggtggagtgggtggggtctgcttctgagaagctacttgcttctagtaaacggaggacagggatgctacaaaacagttcatagggacagcacccccacaacagagaattatacaaccagcccaaaatgtcaatggacatttgggctgagaagtcttacatgacagaatgcttcctaccctgatctgacgttatttccaaggattcaaaggtaactgcttcaaaattaaacaaattatagaaagccatcaataaatcaaccccttattcatgttgcagctctcttccattataaataaaaatggattgaaacttacgataaaagggaggcagggacaggagcggggaagcttggcgagcagaaaggaaattcaaacttattattaaggttaagaattaagatgtaaatatgtagatgtttttcacccctaggattttcactaatccaaaagttcacggactgctttgaaatttaattatttggaactggttaaatgttaccctgacctcagctaacatttgtgtttcacttttctccgggacccaggggacgtggatgccagatgagtccacctcctctccctgctcttcccgcagggacagagcctgccaggtgctggtgactcggatcctgacaggaggtcgctctgcggaagactggcaggatcccagagcaacagactggggctcgatgccccttccccgccaggtctctccgtccgcaactgtcctcctagtaccgggtatcccgcaggcggggctgcggaacgcacgtcccctgcgccgtgacgtcacaatagcgactcactggacccagcccttagcaacggcctggcaacggtttccctgctgctgcagcccccgtcggctcctcttttccagtcctccactgccggggctgggcccggccgcgggaaggaccgaaggggatacagcgtgtccctgcggcggctgcaagaggactaagcatggatggcagccggagaggtaaagggcagctgtcaggggctaccgccgcctcgcccctcgctccaggcggcgctcccagcctcgggtccgggcagctgagtgcaaggccgccccttggggcgcttcctacccctggctgagtcgccagtgttgcctggagctgcccaggcctgcgcaaaggaagagggagagcctgcttgccagcctcgcaggtccgcttctttgccctgaatttgtcgccctgacaccaggggcccctgtctcctgaactcagggtcgtgcagcctttaaaacctcagtagctcccaggcagaggaaccaggtttggtctttggagtcagacctccccgggccccaaatcaaacccctctgctctccatggagacgaccctcagttttcttatctcttgaacgtgagggtcaaatacccaggccatggagttcttgaggattaaatgcagataatatagagaagatcctggcgcatttgaagtggtcagtaaatacgaaatctcccagtaacgaactacctcccccaaagctactgagtaacccagggtttctgtaactttctgtgaataggaatcccctcagggtcatgttaaaatgcagattatgattcagtaggtcccttgggggtggctgagattttgcatttataataaattccaagtaatgcggtgttgctggtcagcggactgcagttttagcagcaatccgtactcaccatatacacctgttctctactgatttcttgagtcaggtggacatcatgtggtggggttgggggtggggaaatacaatcttaaatatctacaaatcggcccaaaccaaataatttgcattttcacactttctgagccagtatcattctttcctcgagtcaaatgaggcaatctttatagactccccgcccctcccaattcagtgtttttatctatttaaaagactgcctttaaaccaagctgctagatgattccttgatgtctttctttgaatgagtctgcctttattatatagtcattgatcaaaataagtgctactccgaatgtaggagataactattcattgatcagcaaactattctgacacttcaccaacctaggtttcagaaaaagcaaatcaaaacgctttatgatcttaagaaattttgcatataaactaacattaaacccttgctatgtactaggaactatttccaaattatctcatttaatgtacaaaaataccttgataggcattagccttatttcatagtgaagaaactaaagcaaaagatcacaaataacttgccaagatcacagcggcagaacaggatttgaatctaggtgaagaatataaatctgaagccaatgcatttacttactatcccatggtagggatgggcagggggaaaggataaatgtaacatttagagtatggtagatttagtaagttgtcagtatttgtttattgaattattttaaaaattgggttcatgccaaatgtaaaaaggtttatatttttacaacttgcacaatttaattagcttcatttttaggaaataatatatgataatgtcaaatactgttattttgaatttttaaaataaatgtaatcaccaaataaccagggcagtcagctttcatgtactgtaaattaataggaaaccataaataattttagacacagctaaaataattgagaataaatttcttagatttcattaggaggtgcttttagttatttcagagcataaaatattaaaacatctaaagaaaaattatcttttgtcatgctcttactgtaatcacgttttagacattcttttgtaaggcaagccttctaaatggtggtatagtacagcaccagactgaaaaacggttagtcttgtttgtaatctttgtttcctactaactaactaggtaatcttcagcatgtcactgtacgtccctgggcctcagttatttataaaatgggggcttggactaggtatatataaggcatggtttccagcttcctatgggggaaggtgaagaaaagattgagaataacaaactgccattcactctaatatcaatgacctttaggaaggagaggagacaacctattagtatattactgaaagtaacttgaaaaaaaattttttcccagcactctgggaggctgaggcaggtggatcacttgaggtcaggagtttgagaccagcctgggcaacagaattaaaccctgtctccaccaaaaaatacaaaaattagccaggcatggtggcgtgcgcctgtagtcccagctactcgggaggctaaggcaggagaatcacttgaacctgggagggggaggttgcagtgagccaagatcatgccactgccctccagcctgggcaacagagcaagactccatctcaaaaaaaaaattgttttgatctgttggtctcatagagacacttatcaatggtagatttccaaacctttggttttccagagaaaccttgccacaagaaacactttcatctttcctcactggactttcttctggctattttaatcaaattgtgtaggaaaatgggctgctctcatataccagtgaatttcaccactaagaccttcaatctcattgacaagattttagtcctaatagttagagaatgatgttcttttccttggcatttggtttgaggctacttctccatgcccctttggctcattctgggtccagtccagtcaggagatagaaaccatacagtgatttttatacaaggaaaagttaaagaattgttatactttcataaaagagtaactataagatgtaaggggctgggcgtgtcagctcatgcctgtaatctcagcattttaggaggctgaggcaggagcatcacttgaggtcagtggtttgtaatcagcctgggtaacatagcaagaccctgtctctagtatataaaacaaattaatgaattaattaaaaagataagaaaactgtatttggtacctagaattacgggaaagtactcaaagaaggacaatttgaaagagagtttctcccaaagactggggttcagacctcattagagaaggcgtgattgtgcacttgcccaaagcttcatcaccgaggagtgatatcggaggcttcacattccatgggaaatagactttgataaattgcttagccaagtcactaaacaaacaagtgaacaacaatgaaaacaagctcaggagaggattctgtatctagagttgctgcaatatattacctaaaatgttaacttttcaacaaaaagaaattgcaagtcatgcaaaaaaacaaaaacaaaaaaacaggaaaatgtgacctatacacaggacacaaaggaggaaccagaaactatgagagggtagatgaattaaatcgtcttatttctcccctcaattctgttaggtttttttttttcctttctctttcttttttcttttttcgagacagggtcttattctgttacccagactggagtgcattgcagcctcctgggctcaatcatcctcccatctcagcctcctgtgtagctgggactacaggcacacaccaccacacccagctaattttgtatttttttgtgcagttagagtttcgccatgttgtccaggctggtctttgaacttctgggcttaggtgatcagcctgcctcagtctcccaaagtgctgggattacaagcacgagccattgtgctcagccctaattctgtcatttttaatatgacatgtatctataggaatattagaaaccaatgagtatatgccttggtgtacgtctgatggtaaatagacaagggaacatagacatcaaggaacatctaaattccatgtttgttcttatcaccatcttatgctaaagagcagctggattgattcctggggccaaatattaaccaccttgttcacagctgtcacttacagatgggtggggaagcatttctatccagagcattatcactaggttccagccttttttcattctcttttcatcctttcacacttctctgggtatacctgtttttcctttttctgtgacctatagtgaaacatacatagaatagaatggaatttggagggaataaactacatacagctgagatatcttcttggtctgtttcacatgatttagtagcttagaacatggttcaagtactgagcagtttatattggtcaagatagtgtaatgattaagacccaggaaacagactgcttgggttcagatcccaaatctgtcacattcttgtgtaatctttggcaaattacaagtttaacctctgtgcttcaattaccctcatctataaagtagggagaattatagtattgtaaggattaaatgaatttataccagcaaagtgcttggagcactgcctggcagggttaccactcaataaattagccttttgactacaaatgaagaaatcaactcatactggtttaagctaaaatgggaatttttttttttttttggctaatgtaaagaaacgtctagggaaggaagagcttcaaacatggttggcctcaggtactcaaatgatgtcaccaagaaatcgctttctatcttggttccacttgactgtgtaggcttcattctcagacaggttcctttataaggttcaggatggccaccagcaatacagggcttgcttagacccttcactgggtttagcaagcccagtgaaatgaaagtacctttcctaatagttcctgtcaaaggcccaggattgtgtatctcatgttgggacttggatcgcatagcattgctgacgctgtcaacacagctgtccacatttgggttttatgcctaaccctgacagtggggtcagctctatttgaaccacctgggctaagagtaagggaagagtcgcccaaaggaaagttgagttgtcatttccaggtgaagaggcattgaattctggacaagaaaaaagtcacagttctttctatctggagaaatgaggtttttctgagagtttgttggtattttttcttatgtttaggtcttaccctccttctttcttggtagaagctatgctcatttcatgactatcttttttcccagttcagatggcatcaccttgacttgtattgtcctaaatatttttttccttcctgcactctgacctgtgacatagaaagagcttcatagatattctgacctcagtttgtttttctgttttaatctattctgacaagctttgttctctggtcttagattttagttctcctagctcgatacttcttttttctatatttagtcatccatatatcttctagactttctatgtgtcctccttgttatagcttttaacagcccacctgatagcaaactagccatcttaccctcttaaaacatctctgtttgggggataaagcatttatattttgcatattaaattacatttaatgctgtaactcagacttcctgttttggagattactactaaaaacgcaatcaccttttaggaaagaaattattttgtgataaatttattatttaaaaaatattgaatattgttgtttttgtaaaagttgtgtttcatttatcctaatttatgatttttttttcttgttaaaagtcagagcaacctctgtccttcccagatatggtccaccgtgcctatttaaaggacacttgagcaccaaaagtaatggtaagtgaggtgcttaaaacggcagctttgttagaagattgtctgagtgtttcctttactggcaaattatatgacatgatggaaaaattgtttcatttgacgaatatttgaacttcatattattaattttaatgaaatataggcgttcttgagattagagaattttggagtctatgatttcaaactattattgtgccctggatgtggacttggctgtctcctgctcccagctgctacagcagcccagctctacttttgccaggaaactaccctgatttaaggcatacctgccttgttaaaatggtgagtagcaggtattaaagacgcaagcactgaaaaggaaaagctgtgcagagaaaaagagcacttgaataatacatttcctattaggagcaaaggcctatgggcctctttatccaactggatttctaggtgctgtgatatttttatattttaaagctttcaaggtacatttttaaggtaggttttaaaataaatttttgtaattataccttagaagtataagtctatgtccttaggcaaaataattaaagccttattttccttatttacaggaaaaatctttgatactgttacctccaaatgtggtggaaggatctcattttcagttgcctcacttatttctttgtattacagtgtattttttaaagtttatgattgtggctatgtatgtatgtaacatatatatgtatgtaacatagccataatgataaactttaaaaactaaattttaaataaaaagttaaaactagatttaaaatatacatacatagaaatcaggataaagaacaatatgtaaagtttgctaactttcttttaaagaatatatatatagagctggtataggtatggtggttttaagtatgaggctgccttggatcacatggaagctgcatcctttatcagcagtgtaaccttgaagatgtaactcatatctctgtgcctcagttttcacttcgattaaatgataataataatgactagataagtttatacatataaagagtttagaacaatgcatggtaaatggcatttattcagtaaatatttttagtagtggcatcaagctcgtaattattgcataggcttgtattatgcacagagtctctggaaggatgcatttaaacagtaacatagtatatttctgggaagggagactaaaggtcagggtagagaaatcacttctttttcaaactccatatgccattttagctgttgaatttttttaaccacattgcgtgtattacttctcaaaaactgtttttaatgtttaaaaaagctttgcctatatttatattttatacttgtgtgtaagtgcttaactatttctaagatttcttttaaacagtttgaatgaggaccaaggagtttaatgtcatggaatttctttgcgattacacttgttataagatagttttagtacttcaaaaagaatgtagtaaactggtatgtagatcttgttttcaggtttaagttagaaatttgcttcttggaatataatttttgtatgtagggttttgggatttggtagtcattgaatttctgaaattccgttgattaagtattaacaatggtaactaattaagcaagcagctaaacatccttagttagaagattgagagctgtcaaaaaaaaaatagttctgtaaatgtaatgacagatcatatcctagaatctcttccccagagtctcaggcttgtaaaattttattctcaggaaggtttgaacccaaatggtcaatagctcattggcattatcagtgcaagattaaagcttcacatcacaatgtcatatatcaatatctctggttgaatttcagaacattttataagaatgagttaaataatcagtgccttgtttatctcatgatttttatattagttttaaatatataatgattatgttttaatttttagctttttgcactgactcctcttctctcagactaagcactctccagctggtcaagaatcacatggctgttcactataataaaatcctttcagccaaaggtaaaaatgtgcaaatgtgaactctctgtactcaatttaaacctccagcttcacttctcattaaaatatatctatagcaaaaatgaataccttatatatatgagaggatttgtatttgtttggtttagtgtgatacaaactattgactctaggtacttagcaaattcatacccatttttgttaactatatttgaaatctatatattgcctattttatttcgttttttatctctattgctaataatattttgttagatattgcttttaatatgaaaatatataatctgcttttttgtttacacatctatggaagttgcacaaagaagatgctatttttctgtttaatttttttcttttgtcagctttattgagataaaacttacattataaaatgcattgattataatgtgtacagataaatattttgaaaaatgaacacatttgtataaatactactacaaccatgctgtaaaacaggaatcagctaactacaccgttcaggccaaaccctcctaccacctgtttctgtacagcccatgaactaagaatggtgttcatatttttaaatggtagcaaaaaatttaaaaaaaagtattttgtgacctgaaattcaaatgtagttatccatagacaaacaatcattttcaatcttttacatattgtctgtggcagcttttacactaaaaagcagagttgaccagttgtaacagactgtatcaccctgcaaatcctgaagcatttgctacctggccctttgtagaaaaaatttgccaacccttgatatagaaaaagtccattacctcaaagagttccccctagtcctttgccgtcagtcccctcctgacaaatccctggcaaccactgatctgctctttcgcctatagttttaccttttctataagttcatagaaatggaatcatgtatcgttttgggtctggcttttttcagttatcttaatgatcttgagactaattcacactgttctgtgtaccaccatttattcttttgtattgttaaggagtatttcatttaatgaatagaccacaatttgtttatgattcaccagttgttaaacatttggattgttttgactcacttttggccattaggaataaagctgctataaacattcacatataattttggcgcatgtgtttacgtttcactcgggtaaatttatgtgtcaggagtagaactgtgaggtaatatattaagtataagtttaattttataagaaactacagttttccagagtgaatataccatttacatttccattacttctgcacccttaccaacccttggcgttgacagtccttttttaaccattctagtgaatatgaaatagtatcacttcatagttttagtttgcatttccctgatttctagtgatgttgccttattacttcccatctgtatatcttctttggtgaaatgactgttcaaatcttttacccattattaaaaatgggttgtttgtctctttagtattaagttgtgagtttctttatatacagattctatatcagatatatgttttgcagatatttttttcccaatctgtagctggtgttttcattttcttgttaaaattcgtattctggagaaatttttagacttacataaacatttaaaaattgtatagggagttaccatataccctgtactctgctcttccactaatgttaaaaatcttaaaaaccgtggtatagttatcaaaaccaggaaatcaatattgatgcaatcccattaactacagaccttatttgaatttcaccaatttttgactaatgtcttttaaatttttattttctcatttaaatagctaaagtttttaaattttagtttatattttatgatgcttatatttttaaatgactaaaaaaacaaaagaaaaatattttgtgacatgaaaatcgtgaagtcgtttagttttttagttttataaactaaacaggttatttcataacctgttcaagaaatatttgcctaaccttaggtcactcagaatttcttaatatgttttcttctagaagttttaaagttttagcccttacatttaaatttgcgatccattttgagttagtttttgtatatggtgtgatataagggttttgaggttttttgtttgttttgtttttttgcctcttcatatccaaatttcccagtaccatttgttgaagaggttatcttttctctatttaattgtcctagtactttttgaaagtcagttgaccatatgtgtgggtctgtttctggacttaactccttggttctgttgatctatatgtctatctttaagccccatgccacactgccttaattattgtagcattacagtaagtcttgaaatcaggtagtgtaagtcttccattttgcttttttttccccaagcttgttttgggactacattataagtatgttaagtctgtttcattttgagtagtttatattgctatgtcttcaagttcactagtattttcttctgcagtattgaatgagttattaatcccaacagtgtatttttaatcaaggatcttgtgttttccatcgctagaagtatgataaacagctgcaaggtctggaacattttgtgatttccacatttggtatttgtcatttataaatactgacaatattattaaactattacctttctctttcagctgcagtagactgctcggttccagtaagcgtgagtaccagcataaagtgtaagtaatttttggacattattacctttttaaaaaaaaattaaggtaaatatacataacataaaatttactgtcttaaccatttttaagtgtccagttcaatattaagtacattaatattgtggtacaatgataactactacctccagaactctctttatactgcaaaactgaaattcctgtgccacataaacaataatttcctcccataggccctggaaaccaacattcttttctatcactatgaatttgactactgtcaccattgtacttactatctctatgaatctattttaggtaccttatataagtggaatcatatcgtgtttgttctgttgtgactggcttatttcacctagcatgatgttctcaaggttcacccatattgtaatgagtcagaatctcctttttaaaggctgaataaaattccattctgtgtatataccacattttacttatgcattcgtcagttgatggacacttgagttacagtcaccttttggctgttgtgaataaactatactgctatggacatgagtatacaaatacctcttcaagaccctccttttaaagattttgggtgtatatttagaagtggaattgctaaatcatatattctatttttaattttttgagaaactaccatactattttcttttcttttcttttttctttttttttttttgagacagggtctcactctattgccctggggctaaagtgcagtggaacgatctcacctcactgtaacctccacctcctgggctcaagcaatcctcccacctcagcctcccaacagcctcccaagtaggtgggactacaggcgcaagccaccacgcacagctaattttgccacagcctttttacatagagacagggttttaccatgttgcccaggcttgtctcaaactcctgagctcaagtgatccacctgactcagtcccccaaagtgctgggattataggcgtgagccactgcacccagtgaccatattgctttctatagcagctgcaccattttccattatgactaatgatgctcaagtattcagatttccccatgtcctccccaacacttgctttttcctatttgtttaatagtagccatactaaaaggtgttgacacattgccttttgagaaagcatttctaacttaaaaattatccaaaaatacccaggcacagtggctcacacctatgggagacagaggcaagtggatcacttgagcccaggcatttaagagtagcctaggcaacatggtgaaaccctgtctcttcaaaaaatacaaaaattagctggatgtggtggcatgcaactctggtcccagctactcaggaggctaaggtgggaagattacttgagccagggaggtcaaggctgcagtaagccatgatcatgccactgcactctggcctaggtgacagggagatgctgtctcaagaaaaaaaaaaaaaaaggaaaaagaaaacccataatgttgacacaggatatatagaatccttatatatctaccctttgaccaggttatcttcatttttaaatcatcagaccaaaaatttgaaaaccctgtttaaaaatttctgaagaataccatttgaaacctttgtttttgatttcaattaagaaatgtatactttatgggaggccgaggcaggcggatcacgaggtcaggagatcgagaccaacctggctaacagggtgaaaccccgtctctactaaaaaacaaaaaattagctgggtgtggtggtgggcacctgtagtcccagctactctggaggctgaggcaggagaatggcgtgaacccgggaggtggagcttgcagtgagcagagatcgcatcactgcactccagcctgggcgagagagcaagacaccgtctcaaaaaaaaaaaagaaatgtatcctttaaaaataggcaaaaaacatggctgtcacagcctttgattgtcgtattaatcatataaaaatcagtgttatacgtatgtttattgcagcactattcacaatagcaaagacttggaaccaacccaaatgtccaacaatgatagactggattaagaaaatgtggcacatatacaccatggaatactatgcagccataaaaaatgatgagttcatgtcctttgtagggacagggatgaaattggaaatcatcattctcagtaaactatcacaagaccaaaaaactaaacaccgcatattctcactcataggtgagaattgaacaatgagatcacatggacacaggaaggggaacatcacactctggggactgttgtggggtggggggaggggggagggatagcattgggagatatacctaatgctagatgacgagttagtgggtgcagcgcaccagcgtggcacatgtatacatatgtaactaacctgcacaatgtgcacatgtaccctaaaacttaaagtataataataaaattttaaaaaaagataaaaaaaaatcagtgttataaattttaagtttagtgttttctaagtttctaagttttctaagttaatatttgaatttatgtagagtttgagaacatttctacattaaaaaagtaaatatcagccaggtgcagtggctcatgcctgtaatcccagcactttgggaggctgaggcgggcggatcacgaggtcaggagatcgagactatcctggctaacacggtgaaaccctgtctctactaaaagtacaaaaaattagctgggcatggtggcaggcgcctgtagtcccagctgctcgggaggctgaggcaggagaatggcgtgaacccaggaggcggagcttgcagtgagccgagatgatgccactgcactccagcctgggcaacagtgcaagactccgtctcaaaaaaaaaaaaaaagaaaaaaaagtaaatatcaacctaaggttaattcatgctaaatgataaatgaataaaagcatacatagggaaatgccttttgggtgcaatctaggaaagatcacaaacagtaggaatggttaactcatctctgcttgtatatcttagttgaagagatagaaggtaggggagaaagtaactaccagctataggtcatagctacaaacacagtgtctgtctcaggccttgtgcttgacactttgtattctcccttttctattctttttatgtttgcaacaaaccttcgtgtaggctgtcatatttttgaaggaaaattagattcaaataattttaaaggaggaaaaaaggcatgttaggcaagagtagagacttcttagtacatatttttaaagaccagtttggtcgctacatacaagttatatgggcaagtcattttacctctgaccttccttttttgtgaaatgaaaggtaattagatgatttctaaggacccttccagatttttaatttctgtgctttacatttttttcttctgtatcatattagtaacttttttgtagcacaaaactggttcagtgtttacatgctttaaatatctggatcatttgaattaagttggttgggattacaggcgtgagccaccgcgcctggccttaaaatgatctctagagacaatgacagccattatataatttttaaagggtcaacttaacaggaagatgtaacaattatctacatacccaacatcagaactcctaaatatatcatgcaattgtggacaaatctgagggagaaattgactttaatacaataatagaagacttcaataatccactttcaatagtggatacatattataagacccagacagaaatcatttaaaccgctgacttgaacaacataatagaccaaaggaatttaacagatatatacagacctttataccctattgaagaatacgcactcctcaagtgcacatgaaaccttcttcagaatagatctcatattaggccataaaatcagacgtaacatatttaagaagataaaaatcatttcaagtatctttttcaaccagaatggaataaaactaataattaatagctgtaagaaaatgggaaattcacaaatacatggcaactaaacaacacattcttgaacaagtattgagtcaaagaagaaataaaaacagaattttgatatcttgaggcaaaggaaaacaaaaccacaatataccaaaacttacagaatgcagcaaaattagtactaagagagtggtttatagtgatgaatacttacattaaaagaggggatctcaaacaactcaactgtatacctcaaggaactagaaaaagaagaataaactaagcccacctcggtaaatccctagaaacatacaaccttcaaaaactgaatcaagaagaaatatcctgaatagactaatagaaaaaaggagattgaatcagtaatcaaaaacttcccaacagaggccacatgtggtggctcatgcctgtaatcccagcactttgggaggccaagacaggcagatcacttgaggtcaggagttcaagaccctctggccaacatggtgaaaccccgactctactaaaaaatacaaaaaattagccagatgtggtgttgcacacctgtaatcccagctactcaggaggctgaggcaggagaatcacttgaatccaggaggtggaggttgcagtgagctgagatcatgcccctgcactccagcctgggtgacagaatgggataaaatctcaaaaaaataaaattaaaaattaaaaaaaacttcccaacaaagaatagcccaggaccagatatcttcataggtaaatctaccaaatattcaaagaaaggatagcaccagtccttcttaaacttttataaaaatagaagtgggaatacctccaaactcattttatgaggctagcaccaccctgatgccaaaaccaaacaaagacaacacaagaaaagaaagctacaggccaatatatctgattgatataagtgcagaaatcttcagtaaaataccagcaaactgaattcaattgcatgttaaaagagtcaaacaccatgaccaagtcagatttatccctgggatacaaaggtggttcaacatatgcaaatcaaccaatgtgatataccacagtaacatagtgaaagattaaaaaccacacaatcatctcaatacatgcagaaaaaccatttgacaaaattcagcatccattcatgataaactctctcaacaaaataggaatagaaggaacttacttcaacagcatgaaagctatatatgaaaatctcacaggtaacatgatgcttaatgaagaaaaacaaagcttttcctctaagatctggtataaggcaaggattcctcacttttgccacttctgtttaacatagtattggaagtcctagccagagcaattagacaagaaaaagaaataaaaggcatacgaattagaaagaaagcagtagagctgggtgtggtggttcactcctgtaattgcaatactttgggggaccaaggtggagagatcacttgaggccaggagtggccagcctgggcaacatagtaagaccatgcctctacaaaataaaaaaactaaaaattaaccaggcatggtgacacatacctgtagtcctagctacattggaggctgaggcagtaggatcacttgagcccaggaattcaaggtcacagtgggctttgaccgtgccactgaattccagcttgggcagcagagaaagaccctgtctcaaaaaaaaaaaaaaaaaaaaaaaaaagtaaggttacttctgtttgtgatgacatgatatatatgtagaataccctaatgcccaataaaaaagaactgttgcaataaattcaatatagttttaggatacaaaattaatgtacaaaaaccagtggcatttctgtacacaaacaactgtctgaaaaggaaattaagaaaacaatgccatttgcaacagcaacagaaaggataaaatgcttaggaataaccttaaacaaaaaggttgaaaacttgtacactgaaaactataaaacatcaataaaggaaattttagaagacacagataaatggaagacatccatatttatgaattggaataattaatattgttataatttttgtactacccaaagtagtctataaattcactgcaatccctatagaaatcccaaagacattctttacagaaatagaacaaacaatcgtaaaattcatgtgggaccacaaaagaccacaaataaaacaatcttgagcaagaaaaacaaggctggagaaatcacactttctaaatttcaaaatatatttcaaagctacaataatcaaaacagtatggaactggcaaaaaaaaacacataccagaccaatggaaaagaatggagaacccagaaataaatccatgtgtttatagtcaacttatcttcaaaagggtaccaaacacacacagtggggaaaggatagtgtcatcaatgaatgactctgggaaacctggatagtcccatgcagaaggatgaaaatggactcttaaaccatagacaaaaatcaactcatacaaaaatcagctcaaaatggatttaaaaacttaaatataaggtcctaatccataaaactactagaagagaacatagaaaaaaagcttcttggctttagtctgggcaataatatttttggatatgactctgaaagccaggcaacaaaagcaaaaatagacaagtggaattcaccaaactcaaaagcttttgtacagcaaaggaaacaatcgacagagtgcataggcaacttacagaatgggaggaaatatttgcaaaccatgtatctgataagaggttaatatcccaactgtgtaagtaataagtacaactcaatagcaaaaaaaaaaaaaaaaaaaaaaaacccaaaaccttgctataaaaatgcatgaaggacctgagtagacattctcaaaggaagacatacaagtggccaataagtgtatgaaaaggtgcttaacattactaattatcagggaaatgcaaatcaaaaccttaatgagatatcactcacacctgtgagaatggctatcaaaaagacaacatgtaacaagtgttggcaaggatgtggaggaaagggaacacttgtgcactgttgctaggaatgtaagttggtacagccattaggcaaatcaatatagaggctcctcgagaaattgaaaatagaactaccatacgattaagcaatcccacttctgaatatatatccaaaggaaatgaaatcagtatgtcaaggagatatctgttctcccatgtttgttacagcattatagcaaatagtcaagatatagaaacaacctaaatgttgacagatgaatggataaagaaaatgtggtatgtgtataaagaaatactacacacacatacacacaacccacaccacatttataacatacacagacacatgcaaaacccacaccacatagcctttaaaaagaaggaaatcctgtcatttctgtcatttgtgacaacacagatgaacctgagggttcattttagcttccacatataagtgagatcacgtggtacttgcctgtgtctggattattaaacatgtgtatgtgcaatctaaagtgggcaacctcagagaggcagagagtagaatggaagttgccaggggctacaggaaggaggaaatggggagatgttggtcaaagagtacaaagttttagttaatgcaagttgagtaagttctggagatctaatgtacagcattaattagagttaacagtactgtataatatacttgaaatttgctaagacagtacatctgtgttctcaccacaaaaaaaagaaaaagtagcaactatgttaggtgatagatgtattaattatcttgattatgatcattcacaatgtatatcagaatatcaaattaaatgcctgaaacatatacagtttgtctgctataccttaacaaagctgaaaaaattattacctaagcaacctgatatatatataaacttaaatagaatggccatctggtcatgactggaaagaatatattaaccagatatatttggttaatgtattgactggaccaaaagaaaaggcatatcttgttataagatagaaagactctatataatgcaaatatattgatacatactttttaaagtattgatactttttaaagtaatttctaaattcaatgtgagctcaattaagatgccaaaaatcagtattgttcatacactacttgacaaaatgttccaaaattaacctacatatatatgagaaaatagccagaaataatctgaacatgaatagaaaagagtagtagagtagccctactaagtatttaaaagtattttaggtcaggcgttgtggctcacgcctgtaatcccagcactttgggaggccaagacgggaggatcacttgaggtcatgagttcgagaccagcctggccaacataatgaaacccgttctctactaaaaatacagaaattagccaggtgtggtggcatgcacctgtagttccagctactcgggaggctgagacatgagaatcacttgaacccgggagggggaggttgcagtgagccaagatcatgccattgcactccagcctgggcaacaagagtgaaactctgtctcaaaaaaaataaagtcaaaatcacaaatttaaaatggtcatttaatttattttgctagagtaacaaaataacatttaatttagtttgctagagtttattcattgatttattcagcatatatttattgggcccctgctatgtgctagacattgttctaagggctgggactaaagaggtgaacaggacaaatttcctgcttttgtagagtttacattgtagttggagaagacaaacaataagcaaatacaaataaataaagaatatgtcatatggtaataaatgcaatggaaaaaaaatgactgagagtcccttggaggagaagcccttgctgataaggtgacaattgagcagagacctgaaagaattaaggaagaggcatgtggctatctggggaaaaagcaatccagacagaggaaacagcaagtttaaaagccttgaaatggtgtcatgattggtgttttcaaaaaacagcaaggagggctgtgtagctagtatggaataagccaactgaagagtaatagatgaagtcactgagatgggacagagggatgcagagaataaaaggcagtggccattgcaaagactttggccttcactctgaatgaaattgcaagccattggagggtcttgaagagaggagtagcagggctacttttacttttaaaagcatccctttggcttcatagttgggaatagtctgaagcagaatgactagttagaagacagtaaataatccagatgagaaataatggtgactgggaccagagtggttgcagtggagagagattgaaataatcagattctggaaacatttcaaatgtgtgtccatagtatttactgatgggttggatgtagatgtagtgtgagagagaaaagaggattgggtcaaaaatgacttccaagacttagaacctctcagccaaaaggatggagttatgatttactgaagtgagcaataccataggaaaagattgagaggagaaagcaaagcagtagttcagtgttggtcattacatttgaaataaatgcctattacatagccagttggcaacccttaggaggcagttggagtgcaagtctggaattcaagagacaatttcaggatagagctaaaaatgtgggatttgacagcatatagggggtatttaaagaattgcttgcactttttgtttttaaaatgtagatttagctagtgcttatttatccatggtattttctgcttttagtcaattaaggcaggaatttttcctttttgctacataaaccaaattgtgatggcttagagtaattgcaaatattataatcaccaagttaagtgtaattaataatcattcttcattatatatgatttttcattataatgaatttggcttagaaacaggctttctagacacataaaaagagaagtctctggatttgagccatctctgtttttataagctactctgtacttttctgtcatagcagactactgacttgatcagttcctaacctggaatatagtttattgaattatttaaataatttaatttttatagaagttttattgaaaaataatttacatactataagattcactgattttttactaaatttacagaattgtgcaaccacaaaccaattttagaacattttcatcattttatgaagatcccttgtacccatttgcagccacgctgcaaattcctacccctagccccaggcaaccactaatctactttttttttttttttagcattctattttttgttattgggaaaagaagaaattctattaaataaatatatttacaaatcaaaatgatctttaatcaatttgtaactagtttccacaattgcatttgtatacagtttctttagagaagaaaaatattgactaaaaaatgtccaggtgttctttttttattattattattatacgttaagttctgggatacatgtgcagaacatgcaggtttgttacataggtatacatgtgccatggtggtttgctgcacccatcaacctgtcatctacattaggtatttctcctaatactatcccttccccagtcccccaacaggccccagtgtgtgatgttcccctcctggtgtccatgtgttcttattgttcagctcccacttatgagtgagaacatgcagtgtttggttttctgttcctgtgttagtttgctgagaatgatagtttccagcttcatccatgttcctgcaaaggacatgaactcattcttttttatggctgcatagtattctatggtgtatatgtgccacattttctttatccagaaagaaatatacccattgatgggcatttgtgttggttccaagtctttggtattgtgaacagtgctgcaataaacatatgtgtgcatgtgtctttatagtagaatgagttataatcctttgggtatatacccagtaatgggattcctgggtcaaatggtatctctggtcctagatccttgaggaattgccacacggtcttccacaatggttgaactaatttacagtcccactaacagtgtaaaagcgttcatatttctccacatcatgtctagcatctgttgtttcctgactttttaatgatcgctattctaactggcatgagatggtatctcattgtggttttgatttgcatttctctaatgaccagtgatgattagctttttttcatgtttgttggccacatcagtgtcttcttttgaaaagtgtctgttcatatccttcgcccactttttgatagggttggttttttcttgtaaatttaagttccttgtggattctggatattagccctttgtcagatggatagattgcaaaatttttctcccattttgtgggttgtttgtccactctgatgacggtttcttttgctgtgcagaagctctttagtttaattagatcccatttgtcaattttggcttttgttgccattgcttttggtgttttagtcatgaagtctgtgcacatgcctatgtcctgaatggtattgcctaggttttcttctagggtttttatggttttaggtcttacatttaagtctttaatccatcttgagttaatttttgtataaggtgtaaggaaggggtccagtttcagttttctgcatatggctagccagttttcccaacactgtttgttaaatagggactcctttccccattgcttatttttctcagatttgtcaaagatcagatggttgtagatgtgtggcgttacttctgagacctctgttctattccattggtctatatatgtgttttggtaccagtatcatgctgttttggttactgtagccttgcagtatagtttgaagtcaggtagtgtgatgcctccagctttgttcttttggcttaggattgtcttggatatacgggccctttttttggttccatatgaaatttaaaatagtttttttctaattctgtgaagaaagtcaatggtagtttgatggggatagcactgagtctataaattactttggacagtgtggccattttcacaatattgattcttcctatccatgagcatgtaatggttttccatttgtttgtgtcctctcttatttccttgagcagtggtttgtagttctctttgaagaggtccttcacatcccttttaagttctattcttaggtattttattctctttgtagcaattgtgaatgggagttcactcatgatttggctgtctgtctgttgttggtgtatagaaatgcttgtgattttttgcacattgattttgtatcctgagactttgctgaagttacttatcagcttaaggagattttgggctgagatgatgggggtttctgaatatacaatcatgtcatctgcaaacagagacaatttgactttctctcttcctatgtgaataccctgcatttctttctcttgcctgattgccctggcctaaacttccgttactgtgttgaataggagtgatgagagagggcatccttgtcttgggccggttttcaaagggaatgcttccagcttttgtccattcagtatgatattggctgtgggtttgtcataaatagctcttattattttgagatacattctatcaacacctagtttattgagggtttttagcatgaagcgctgttgaattttgtcaaaggccttttctgcatctgttgaggtaatcctgtggtttttgtcattggttctgtttatgtgatgaattatgtttattgatttgcatatgttgaagcagccttgcatcccagggatgaagccaacttgatcgtggtggataagctttttgatgtgctgctggattcgatttgctggtattttattgaggattttcacatcaatgttagtcaggaatattggcctgaaatttttttttcttgtgtctctgccagggtttggtatcaggatgatgcaaaatgagttagagaggagtccctctttgtctgttgtttggaatagcttcaaaaggaatggtaccagctcctctttgtacctatagaggaattagactgtgaatccatctggttttgggcttttttgggttggtaggctattaattactgcctcaatttcagaacttgttatgggtctattcagggattcgacttcttgtttagtctcaggaggatgtatgtgtccaggaatttatccatttcttctagattttctaatttatttgcatagaggtgtttatagtattctctggtggtagtttgtatttctgtgggatcagtggtgatatcccctttgtcgttttttattgtgcctttttgattctctattttcttctttattagtctggctagtggtctatctattttgttcatcttttcaaaaaaacagctcctggatttattgattttttgaagggtttttcacatctgtatctccttcatttctgctctgatcttagttatttcttgtcttctgctagcttttgagttagtttgctctcgctcctctagttctttaaattgtgatgttagggtgtcgattttagatctttcccactttctcctgtgggcatttagtgctgtaaatatccctctaaacactgctttagctgtgtcccagagattctggtacattgtgtctttgttctcattggtttcaaagaacttatttatttctaccttaattttgttatttacccagtagttattcaggagcaggttgttcagtttccatgtagttgtgtggctttgagtgagtttcttaatcctgagttctaatttgattgcactgtggtctgagagactgtttgttatgatttccgttcttttgcaattgctgaggagtgttttacttccaattatgtggtcaattttggaataaatgtgatatgctgctgagaagaatgtatattctgttgatttgggatggagagttctgtagatgtctagtaggtctgcttggtccagaactgagttcaagtcctgaatatccttgttaattttctgtcttgttgatctctttaatattgacagtggggtgataaagtctcccactgttattgtgtggcagtctaagtctctttgtaggtctcaagaacttggtttatgaacctgggtgctcctgtattgggtgcatatgtatttaggatagttagctcttcttgttgcattgatccctttaccattatgtaatgcccttctttgtcttttttttatctttgttggtttaaagtctgtttttttcagagactaggattgcaacccctgcgttttttgttcccttgctggtgaggagttgtgatcctttggaggagaagaggcgttctggtttttggaattttcaacctttttgcactgttttttcctcatcttcgtggatttatctacttttggtctttgctgttggtgatctttggatggggtctctgtgtggatgtcctttttgttgatgttgatgctattcctttctgtttgttagttttccttctaacagtcaggcttctctgctgcaggtctgccgtagtttgctggaggtccactccagaccctgtttgcctaggtatcaccagcggaggctgcagaacagcaaagattgctgcctgtttttccttcaggaagcttcgtcccagaggggcacccgccatatgccagccggagctctcctgtatgaggtgtctgtcaacccctgctgggaggcatgggggtcagggacccacctgaggaggcagtctgtcccttagcagagctcaagcactggctgggagatccgctgctctcttcagagctggcaggcaggaacatttaagtctgctgaagctgtgcccacagccaccccttctcccaggtgctctgtcccagggagttttatctataagcccctgagggaggctgctgcctttctttcagagatgccctgcccagagaggaggaatctagagaggcagtctggctacagtggccttgtggcgctgtggtgggctccgcccagtctgaacttcctggcggctttgtttacactgtgagggaaaaaccacctactcaagcctcaataaggtggatgcccctccccccaccaagctctagagtcccaggtcaacttcagactgctgtgctggcagggagaatttcacgccagtggatcttagctagctgggttctatggggtggaatatgctgagctagaccattcgcctccctggcttcagacccctttccaggggagtgaatggttctgcctcactggcattccagttgccactggggtatggaaaaaaactcctatagctagctcagtgtctgcccaaacagccacccagttttgtgcttgaaacccagggccttggtggtgtaggcacctgagggaatctcctggtccgtgggttgcaaagaccatgggtaaagcatagtatctgggccagagtgcacaccgttcctcacaggatagtccctcatggcttcccttggctaggggaaggagttcccctaccccttgcgcttcctgggtgaggcaacaccacaccctgcttcagctcaccctccgtgggctgcacatatacagtatttcatcctgtatatgtaccacattttctttatccaattcaccattaatggacacccaggttggttccatatctttgctattgtggatagtgctgtgttggatatgagggcatgtgtctttttggtagaatgattttttggggggggtttatacatggtaatgggattgctgggttgaatggtaggtctatttttagttatttgagaagtcttcaaactttcctcagtggctcagtcttcagctttcctcagtggctgaactcacattcccaagaacagtgtgtaattcctttttccccgcaaccttgccacatctactattttttgacttcttagtaatagccattctggctggtatgaaatagtatctcattgtgattttatttgcatttctctgatgattagtgatgttgagtacttttttatttgttggctgcttttatgtcttcttttgataagtgtctatgtccttttctcactttttaatggggttatttgtttttcttcttgcttttttttttttttttaagttcctcatagattcttgtattagggttctctagagggacagaactaatgaaatatatatataaaggggagtttattaagtattaactcacatgatcacaaggtcccacaataggccgtctgcaggctgaggagcaaggagagccagtctgagttccacaactgaagaatttggagtccgatgtttgagggcaggaagcatccagcacaggaggaagatgtaggctgtgagagtaggccagcctcaacccttcacgtttttctgcctgctttatgttcgctcgcagctgattagatggtgcccacccagattaagggtgggtctgccttccccaacccactgactcaaatgttaatcttctttgtcagcaccctcacagatatacccagtaccaatactttgcatccttcaatccaatcaagttgacattcagtattagccatcacaattcttgatattagttttttgtcagatgcatagtttacaaatatattctcccattctgttggttgtctgtttactctgttgatagtttcttttgcattgcacaagctttttaatttaattaggtctcacttgtcaatttttgtttttgttgcaattgcttttgaggacttggtcacaaattctttgccaaggccaatgtccagcagagtatatcctaggttttcttatagaatttttatagttttaggtcttacatttaaatctttaatccatcttgtagccttgtagtgtagtttgaagtcgggtaatgtgatgcctccagttttgttctttttgcttaggactgctcttttttggttccatataaattttagaatagtattttcaatttctgtgaaaaatgatgtgagtagtttgataggaatagtgctaaatctctagattgctttgggcagtatggacattttaatgatattgactcttccaatccacgaacatggaatgtttttccgtttgtgtgtgtcagctctgatttctttcagcagtattttgtaattcttttagatatccttcacctccttagatattttcctaggtattttattttgtgtgtgtgtaactattgtaaatgagattgtgttcttgatttggctctcagcttgaatatcattggtgtatagaaatgctactgatttttgcacattgattttgtgtcctaaaactttactggaatcgtttattagttcaagaagccttttggcagcatctttagggttttctaattatagaatcatatcatcaggaaagagataatttgactactacttttccaatttggatgtgttttatttctttctcttacctaattactctggctaggactccagtagtatgttgaataagagtggtgatagtgggcatccttatgctgttccagttcaaaagaggaatgcttccagcttttgctcattcagtatgatgttggctgtggacttgtaatagatggctcttattattttgaggtatgttcttttgatgcctaatttgttgagggtttttttttttaatcatgaaggattgctagattttattgaaggtttttgctacatctgttgagatgatcataaggtttttgtttttaattctgtttatatggtgaatcgcatttattgatttgcatatgttgaaccagcctttcattccaggaatgaagcctacttgactgtggtttattaactttttgatgtgctgttggattcagtttgctactatttgttgagcatttttgtgtctatgttaatcagggatattggcctatagctttcgtttttggtgtgtctttaccagattttggtgttagaattatgctggtttcatagattgggtttcatagaatgagttagggaagagtccttcctcaagtttttggaatagtttcagtaggattaataccaactattggtatgtctggtagaatttggctgtgaatctctctggtccagggctttttatggttggtaggttttttttattactggttcgattttggaactcagtatttctcttcagggtttcaatttcttctgaattcaatattgggaaattgtatgtttccagaaatttatctatttcctctagatttcctagtttctatgcataaaagtcttcttaatagtctctaaggatcttttctatttctgtggggtctgttgtaatgttgcctttgtcatatctggttgtacttatttggatcttctcttttatctttgttaatcttgctaacagtctgttgatctgtttatcctttcaaaaaaccaactttttgtttcattgaacatttatatggattttggaatctcaatttcaattatttctgcttttagataattattttctactactagctttgggattagttcttgttattctacttcctctagttgcaatgttagattaatttgagatctttctgtcttcttgatgtaggtatttagcactgtaaacttgcctcttaacactgcttttgctgcatcccagaaattttggtatgttgtgtttctgtttttatttatttcaaagagtttttttgtttttttttaatttcaccttctgttgtttacccaaaagtcattcaggagcaagttggtttaatttccatgtaaaattatgtggttttgaggagtactcttggtattgatttctacctttttttccaccgtggtccaaaaatatgtttggcgtggtttcaatttttttacatttattgaaacttgctttgtcttcgagcatgtggttgatcttagagtatgttccacatgcagatgagaagaatgtttattctgtggttgttgggtggagtattcttctgtagatgtctattaggtccagttggtcaggtgtcaaatttaaatccagaatttctttgttagttttctgctttgagggtctatctaacactgccagtgggatgttgaagtcccccattattaatgtgtggctgtctaaatcttttcataggtctagaagtacttgtatgaatctgggtgctccagtgttgggtgcaaatatacctaggataggtaagtcttgtggaattgaatccttcgtcattatgtaatgcccatctttgtccttattgctgttggtttaaagtctgttttatctgatacaagaatagcaacccctgctcttctatttactgtttgcatgataggtctttcttcatcactttacttcaggcctataggtgtcattacatgtgtgatgggcctcttgaagatagtagaaggttgggtcttgttttttgtttttttttaaataaaatattattttattttttaaataaaaaaattaaaaagtggttcttgccactctgtgccttttaactgggtacatttagaccacttacattcaaggttaatattgatatgtgaggtttgatcctgtcatggtggtgtttgctgtttgctttgtagtcttgattgcgtatttgctttataggatctgtgaacctctgtatttatgtgttcttttatggtagtgagtatcattcttatgtatgcatgtttagaacttccttgagcatttcctataggctaggtgatgtagtttgggtatttgtccccacccaaatgtcacattgaaatgtaacccctagtgttggagttggcgcctgatgggaggtgattggatcatgtctgtgaatttctcatgaatggcttagcgccacccccttgatgctgtccttgtgatagtgagtgggttcttgcaagatctggttgtttaaaagtgtatgcccccacagccttcccctctcgttcttgccatatgaaatgcacattccctcttcgccttccaccacgagcaaaagcttcctgtggtctcccctgaagcagatgctggcattgtgcttcctgtacagcctgcagaatcatgagccaattaaacttcttaccttataaattacccagtcttgggtatttctaatagcaatgcaagaacagtctaacacactaggtctagatataacaaattcctttagcgtttgcttgtcaggaaagactttatttcttctttgtttgtgaagcttagtatttggtgattacatagtcataaataacatggttaagcatttgtaaccttcatatctctgtgaataactgctaagagttgctttcttatgcccttaggcttggccagtttgtcatatcttgttggcattctttttttttttttttttttttggtaactacacaaatctcactatattgtttgtattatttaaatagttaatccatttagaatttctataaattaaatgtgttagttaatatctagaggcacatgtgaaataaataatttttaaaatgtgttagtaactctttatataggaaaataaatggatttttatttacatatcataacattttaacaagaaaaatgttccatttattactctaacaagaccaaaaaaccaattttctattttgttccatattttgaaagatttgttttcccttttagatgcagaccaacaacgaagagagaaactcaaaaaggaattagcacaatgtgaaaaagagttcaaattaactaaaactgcaatgcgagccaattataaaaataattccaagtcactttttaataccttacaaaaggtaagatagtatttttattttttaaaagcaaatgtttctaaggtacttctttagtggtacaatctgactttgtttactatagtttagggtcagcaaatttttcctgtaaagatccagatagttaatattttaaaaggctgttcaggcctctgtcacaactactctgccattggaaggcagacatagacagtacataaataaatgagtatagccgtgttctgctgaaactttattaactgaagacattgggtcagatttggcctgaaggttatagtttgcagaccccagttataggttttttgtgataccttcgaacatctggttaaataagttctattcctagtttgtgaagttttttttttccctttctcctgaatggatattaattttatgaaatgcttttttgcatctcttggaatgatgatattatgatataatttttctcttttaatctgtggggtttttttttttttatatatatatatatagtctcactctgttgcccaggctggagtgcagtggcatgatcttggctcactacaacctccacttcctgggttgaaacaattctcctccctcagcctccccagtagctaggatcacaggcacccaccacgactccagctaatttttgtgttttcagtagagatggggtctcgccatgttggccaggttggtctcaaactcctgacctcaagtgatctgcccacctcggcctcccaaaaagtgctaggattacaagcatgagccactatgctgagcctcttttaatctgttaatgtaatgaattacaaacaattgactttaatgttaaaccaactttgcattcctgttgtaaacagaacttagtcatggtacattaccttttttattcattgctagatttacttactaatatttgtttagaattttggcatctgtccattattgatactggcctgtcattttctttttttgtactccttgtgtctggttatgctatcctcataaaataaactgggcactatttcttctttctgtactctagcttgtgtacatttggtttatttgttccttaaatttggtggaactcaacattaaaattgtctaggcctaaagtattttttatgagaagattttgactactgattcaattttttaagtcattatagaatgatttcaatgttagatttatgtaggaagttgttcattttatgtaaatttttggcagagaattgttcatactattctcttaatctcttctgaatatgtattatttccccttgttattcctaaggtagtttatttgtgccttcattcttcttcttcatcattctcatcagagattgagtcagtttttttaaaggacacactttttattgtgttagtcttctctattgtattttgttttctgttttgttaatatctgtgtttatctttatttccctctctctgggtttattttgctgtactatctctaattttatttaatttattaattctctgccttacttctttgctagtgtaagcatttttaatgctataaattttccaccaagtacagctttagctgcatcccacaagttttgataggtggtatttttattatgtttcaattcgaagtattttacaattttctttttgtttgtttgtttttgttttgttttttgagataatgtcttgctctgttgcccaggctggcatgcagtagtgtgatctcggctcactgcaacctccgcctcctgggttgaagcaattctcgtgcctcagcctcccaagtagctgggactacaggtgcctgccaccatgcccagctaatttttgtgtttttagtagagtctagtttcaccatgttggccaggttggtctctaactcctgacctcaagtgatctgcttgcctcagcctcccaaagtgctgggattacaggcgtgagccaccatgcccggcctacaattttcattatgatttttttatttaacccagaaatcatttagaactatttcttaatctctgtatctgctttttccttagtatctgtttgttacagatttctagcctaattgtactgtgattaggaaacatctatattatatccatttcttgaaatttattgagcacttgttttatgtcccagtaggtggacaattttttaaaaatgtcctgtcattatatgtttgaaaataaaatatattctatagtttttgcatgtagtatttgatatatagtatattcattaaactttgtattttccagatattcaaatcttttatatcatattgattatttttgtctggttaatctatcagttattgagagaaatcttccacatacttacatatttagctatttctccttgtggtactattaatttttgatttacatattttgaatgcatgttattacattagagatattagagatacagaatacagatttagaaaatcctgaaggaggtagtttcttggtgaactgaacctgttatcactgtgctttgaatttctttaccttaatgctttttctattaatattttctgatagtgatataattaaattagctttattttgactagtatttacttggtatatcattttccattttttgatcttaatgttttcttctttttttttttttaatgtcacttgccaatctcaatgttttaggttagtatttggtgggtcagattattcaatctgataatcattgtctttttttttttttgagacagagtctcgcttttttacccaggccagactgcagtggcgctatcttggctcactgcaagctctgcctcccgggttcacgccattctcctgcctcagcctccgagtagctgggactacaggcacccgccaccacgcctggctaattttttgtatttttagtagagacggggttccaccatgttagccaggatggtctcgatctcctgacctcgtgatctgcctgcctcggcctcccaaagtgctgtgataatcattgtctttttaatggggcatttaatatgtttttatttctggcttcttatttcataccttctatttgactcaatgtggtagacaaaatttgaagacaacacccccacagtgacccacacccttaagcaatcccctcctcttcagtgcaggtaggacctgtaacttgcttctacccagtagaatatgggaaagatgataggatgtcacttctgtgattctgttatgtggcaaaagtgaagggatattttcccctgcagattaaggtttttgttccttaaaagagaatggaaaaataagtctgggaagattttccacagtgactgctgtttctctccccaagccacaccaagagaaggtgggaaagggattctctctactcttccctataagcttcgagtaggtttcctggaggaaaagcctgcaagaggtacaaactccccaagtcctcaggtccggtacagacctgagcacatcactagtccacactcagtctttaggaaattaacaaatatttataacataatcttatcaatttatgtggcattccatggcatctttcccaagtaagcaagtgctgggatacttatctctctccatatttcaggttagttgtttgctctgtgacctcagttctctcattagttcaagaaaaatcattaatgtgcagatcgttcagcttttttcttcttgtaatggtgagagctgtgttctttccatctctatctctcagctgaaacagtaagtttgttttatttttatgtgtggtttcattttttgaacttttaaattttgaaaaccttagcatttacaaaaatatagtataataagcccacatgttcctatcacctaggttgtagcaatgatcagctcagagccagtgttatttcacctatatgcccactcactctcctaggttgttttgatgcaaaccccagacaccatataattttatccataaatatttgagtatatatctaaaagatagacttttaaaaccacaacaatactattatgccttaaaaattaataacaggctgggtgtggtggcccacacctgtaatcccagcactttgggaggccaaggtgggtggatcaccaggtcaggagatcaagaccatcctggccaacatggtgaaacctcgtctctactaaaatacaaaaaaaaattagccaggagtggtggtgcgcacttgtagtcccagctactcgggaggctgaggcaggggaatcgaacccaggaggtgggaggtctcaatgagctgagttaacgccactgcactccagcctggtgacagagcgaaactccgtctcaaaaaaaaaaataattaattaataacagttctttaataataaatatctgatgtttagatttccccactgtctcctttttgagtttgttagagttggtattagaaggccagcagtctccttcaactcagtgccagggttcaggatggggaagtttccttgcaagtcatctagttgaggagtagccattgagagaatcccagattctcaagcatgatctcttaagagctttgttttctgcccctagcacccatgatgtggtttaaaaaaaactatggactgctgggcaaaagccagattgactgctctgcttaccaaataccaaggctgtaataatgagtctggatttttttccttgagaaatgctgggagccatagaccagtttttagttgggaagttatgtcatcatactgacactacacagactacactgacaacagtggaggacagttacgagacagttgcagtaatctgggaagcagtaattaagacatgattctatgacagcagagagagcataaggaatacatttaagaaataattagaaagtagaatctcggccgggcgtggtggctcatggctgtaatcccagcactttgggaggctgaggcgggcggatcacaaggtcaggagttcgagaccagcctggccaatatggtgaaaccctgtctctgctaaaaatacaaaaattagctgggcatggtggcatgcacctgtactcctagctactcaggaggctgaggcagaagaatcgcttgagtccaggaggcggggttgcagtgagccaagattgtgccactgcactccagcctgggcgacagagcgagactccatctcaaaaaaaaaaaaaaaaagtagaatctgcaggacttggtgactgagtggatgatgtgaagagtaagaagcaggagttaaaatcctaagtttctgccttgggcaactgggagaatagtaatatatcattcacagaaatataataggatgaggtgcaggttttctttggggctggaggtaataagagataggagtttattgtttggctgtgtttgatttgagatgcttttggaacatctagtatatttagtagacacttggatataagcatctgtgtcagcaaagaggtctgggctgaaaatagacttgggagtcatcaggggaagcagtgaatatgattgagagccccagggctattatgtagataaaaagaccagcaatagagctgcttcctttagaataaatctgttatctgctctgtattatactttgctatctgggattctgttcctcaatatttgaatcacaggtgtattttcatttttagtgattgtactttttaacagaaaatttaaaatttgtttctattattcagcatgagtataaattactaattaaattttgagataagaatggggtttcttgaaaatacaaatcatatattttaatatatctttttaatgtattttatatatctatttatatataataaagtaaaaatatatattatttacatattatatatttttaatatatttctgtaaatgttagatgttttcatttttccaatagcaactataaccctatataactttttgcctccataaagttgttaatttattattttatctgtatttttattgactccatttaggattcatagtaacttgcactttgcctacatttttgataagccctgataataaatattttagatacactcagattgtcttaagagccttattttgggtagtatattttgataattgaatgggtgttatggttaacagacacctgttatggttataatttgtattcactgtaaaggctgctatagttaaaatgctggctttaacctctgaatgtattagccctttatatacattataaaggtcatatatcaaaaaccttttatgataattgcccaattctcttgccacttttcttctcccatactctgactcacatgctgtcaccctcagaaccctcctaagcccttccagtcttcaccctgtaactcttgagtcattcactacttagtcaatgctcccatactactcgtttgcttcactggtgtagcacttactgtgtgcttttaagattaagtgaatatgtgggtgtgagctttatttctgaataaatctagaaaagaggcgggagcagtggctcacacctgtgatcccaacactttgagagactgaggcagacagatcacttgagcccaggagtttgagaccagcctggacaacatggcaaaaccccatctctacaaaaaaaaaaaaaaaaatacaagaaaaaaaaaaaagccaggcatgatggtgtgtatctgttgtcccagctactcaggaggctgaggcaggcagattaattgagcccaggaggtcgtggctgcagtgagccatgatcaggccactgcactccagcctgggtaacaaagtaagattaaaaaaaaaaaatctgggaaactttttaaaaacagtacaaaatagtgaaaatcaagagctatatttgttttataaaatataatttgaaacttttttgcaaacagatgttagattttaaaataattttttttttttttttttttttttttttgagacggagtctcgctctgtcgcccaggctggagtgcagtggcgcgatctcggctcactgcaagctccgcctcccgggttcacgccattcccctgcctcagcctcccgagtagctgggactacaggcgcccgctacccatccaattctacaattgaattgactcttcaagtgtttaaaaatccgacaattggaaaattattgtaggttatgtcttctgacatccttaaaaaagattgatttagtactgagttctgtattgtaaaattcttgacatgaaagtatgatgagtatataaactatgttatggttattactttacataaatcttgaaatcacagaaacagtgcacaacaaacctcgtaaactaagaataacctaagaaagtgagtgttcagggtaccaccagactctttgctccattggcacataattgatgaacccttttctgatttcagaactttacagtgatctgctgttcatgttttgggattctaccagtgtgttacatatattctgcacaaatatctttatccaagtttcatgatattcatagctaaaggaaacaagatgcagattggtacagtggattttatactgtagtctactggtttccaaggaaagaaaaaataggatacaaggtagaaattataagatacaaaaatgggaaaagtttcatgctttctataagttcagaagcaatttttccatcccatttcagagagatagcttaacatatacttctaccttttaaaaagactttcttcagtgtttcattttgtttattaaataaccattaccgataacatttctttacaggcaatcataatggcttatgcatttctttctccttcctctgatctcagtttgtgctgttcttctaagtgtaaataattcctgtgcttattaattaattgccctataggatatttttagactgtacttagaaatttcttctttgagagctaaactcttctggtacataagctgtagtgtgagtatcatttaggactacttataaaaactaacatcttgaagtcatttaccaaatagtaccctagtgactcaaaatttaatgccagcatacttacttgctttgagtaatgttgtcttgtatttggaataaggttataaaacagttggaaaggaaaggtgatttgacatattttagatagtagtcacaatgtccagttatctgcaatttttttgctttgataaatcagcactttaggttagctgacttatttgttcccagaaaaagagttaaaatcagtttaaaattttttatgctgtaaaaaaaatctaaaatcatataattttcaaataagtttttaagtagacaatatgataaagtggcaaagaacatgggctctgcctctgttcaaatctgtgagacactgcacctcagagcagtgtttttatctacaaaatagggtaataattgtactacctctcagaagttgatgttaggattaaatgagctatacatgaaaatgagtacagtaccttgcacatagtaagcacaccatacatattagtagcagtgatagaagttcttattattcctcttctattcaatgtcaagagcagtacctttcatacaggaagcctttttccttactcaacttgtccatcttccccttgttattcctcccaatgaggtaataagacagatataattggctaaatcctagcgatttttaacctcaatttctgtaacctccatgtaatttcccctctacctaatgaaagtgcctcagagttttgcaaaggatatacagatgtgtccgtaagggctgaagtcataggcaaagcttcttagacattttcagtttataaaacaataaaatactatctgtgtttttagactttacaaataacctgtagaaatggttttcctaaagtaaagccaaaaagaaatggagcaagtcaaaatgcctcccttttcatagtattacccccaccccaatgaaaagaagttgagaaatatatatgaaattattatggaataaatatttattaattatatttaaattatcaattacctaaatcagggctccatacattatgaggagaagttccttttcgtttctttaaaggcttaacatcacaaagggatggcttacactgcactctccaataatgacaagacaggacagtgaggatgatgtcactaatagtggttgagaagggcattggtgctcacaatttgtgtggaagctttcagataaaactgacatctcccaataaatcttaatatgcaagttgaagatcccaaatatagatatgttattcatctttttttcgtttcagaaaggaaattgattgctctattacttatatttggaattaaatgttaatatcttagtttaaatacttgactagaacttcagataaaatattaacatcttcaggaacatatcagttaattttgtaaacccttgaggctatcatttttttaatgtataatctcaaaatccccaattacatgaattcgtaatgcagttgatgactgtcatatcgaatgttcttagccctcaggcgaaccgcaaattgaggatgacatgttaaaagaagaaatgaatggattttcatcctttgcaaggtcactagtaccctcttcagagagactacacctaagtctacataaatccagtaaagtcatcacaaatggtcctgagaagaactccagttcctccccgtccagtgtggattatgcagcctccgggccccggaaactgagctctggagccctgtatggcagaaggcccagaagcacattcccaaattcccaccggtttcagttagtcatttcgaaagcacccagtggggatcttttggataaacattctgaactcttttctaacaaacaattgccattcactcctcgcactttaaaaacagaagcaaaatctttcctgtcacagtatcgctattatacacctgccaaaagaaaaaaggattttacagatcaacggatagaagctgaaacccagactgaattaaggtatgacacatcagcaaccaacagtaaatccttcaggaaattaaatgaaaattaatgaattaatattccttgttttctgctgccagccttaagatctgatagtgcccttttgattggaatgagatgaatgtgacttttccttttccatgtatcactagaactatcagagtaattgctgaaaaatagctattaaactggtcaagcaccttatgcgtatgaattacatattttattatttcaagcgtggttcaagaattgtgtatgtttttaaatattatactttcagagaattcttaaaataggtcatcagacagcatttgtggaaatatgcatattgattcatgttaaaagtggcgaaacaatgggctatagaggggaagaaactaaccctttatccatctaaccctctgctccatttcctgcagatattccggccagtcttcatagcaacaactgccaagaataattttaaattgggataatttctagaaattaagtataatttgcctcaataatgttttcaaatacagtagtgcctggcacaagatgaatgttcaataaaagtttgccagatgactaaagaaaaaaacaaatcttgtcaagttttgagatttagcagatttgtgattgtgattgtttttctagtattacataaacaatttatctggcagtaggttttagttgttttagaaagtaaaaacaatttaagattagtatttttttctttgaatatagataagtacagtgatatcagatgagtctgcagatatttaatcaaataaaatcaaataattcaaaattatgtattttataagaatagatgggtctcattctttttgagtttattttttctagccagtaaaccttgttaccacagtgcttatattttgaaggattaacaattatttattttaaattattacagctttaaatctgagttggggacagctgagactaaaaacatgacagattcagaaatgaacataaagcaggtaataagtatgaaatcttttggtattgctacatttgaattacagatgtttttcagtaaatagaatatgtacagctatttagactgtgaagaataatctgttggtggcacttatcatacatgatatagccagtatacagaaggtctgcctatttacaaatggttatagctctctctgaatggccaggtggatcctgccaaatctgggaagtcatttgttactaacatctttcctagatgattggttggctggctggacaaatggaaggatcagtaaaataccttaagtattgttttcaaagatgcagacctggattactagaggagccagcagagtagtgcagaagttgagtttttataccttttttttttttgtaaagaattgccacatattatataattggaaattatacattttataagaataagtagctgttattctcttatgtttgcctctgctttttctagaccatgaagctgtttattacagggtttatattttgaattcttagcatcatttcttttaaaatattgcaactttgagtctgattttgagataaattgttttatttttggagtttcagtcttgcacttgtgtcctgacttaaatttgttgcttataaaaatggtttgtctattaaaatgtcaaacacagatccagagatagaagaataaaatataatcatactcaacttcccccttcccttctgaaaatgggtagaaggtggtagttttccatctcagctattaatcgctgtttgacatagggccctgccacttaaggcccaaggacaaatcacttatcctctgagagctgaatttcctcatctagaaaaactgtacttaacttgcaggattattaggaggagtaaatgatgtaggcaaagtgcctagcctggtaagggcttaataaatgatagctattactagcttgaaatttttggaaagagttagctttgcagataactacgtaaacatgaaaaaatatttatttacaatcctgcaagaaaatgtgtgtccccatattccatagatagtgccatcagtacttgacttgaagaagccagtagagtattaactgcagtagatccatattttaacagcacctttaaaactgtaaagcactatacataaattgtcattgtaaagattgaatctaatgatgtgagtaaatgcttggcacagtttgtggtgtgtagtaaggagtctataaaagtaagctgccattatttttgtttgttaatattattgttcatgctgccagcgctaccactgcttctacatatttgacatgttggcatttaaaacagatgagctatttgaatttctgaataatgagattttgttccctcaaacttacttaaaagttgaaaatttgcttcatttttccctttatatgtttatttgtggcaatttcttaatgtcatttaaatgccactcattaaaatacaagaaataagtcattttatctttaagtttaagaaaaaagtgctggatggatagaaaaattattctaaaatattctttgtcgtactgtataatttttatctactggatatctctgttcaatcacttaaaatttgctgtgttatattctgctttcgtaatgtatttttaagcaaaaataaatattttttttattgcatccccaggcatctaattgtgtgacatatgatgccaaagaaaaaatagctcctttacctttagaagggcatgactcaacatgggatgagattaaggatgatgctcttcagcattcctcaccaaggtaaacagttcacaggagaaataatttcaactgtctttaattgccttcttgtataacagacatatagtatttgccgcataagtactatttaattgcatgctccaatctattttggtgttatgtaattcaataacagttttagttttaccaaggaaattttacaaattgaagtgcttagtaaaagttgaaatgaattaattttgctaattcattagtaaaggaaaaaaccacaccaacttgtattatttattatcactgttcattaaaaaaatgattttccccaagacaagtcctctggcagtgatgctaaccagtttacatgccacaaatagtactgaagagctttaccatttgaggagtcataatttgtgattttgaatattcatcatatcctagtgcttgaccaatctgtgctatatgaagacactatttatttatttatttatttatttatttatttatgagacagtctctctctgttgtccaggctggagtgcagtggtgcggtctcagctcactgcaatggaggcactctttaaaaactactcatcatgttgagtaattaaggaatattatacattaattagcaggtagtagaaaacctaaaagatgcctcgatagtttcagttgtcaaatgtatttccagtgtcagagagtggatatgaaatgccggtggaaggggtagaagaaaggaaggagtagagattaaaaagagggcaagaataaggtgttagtagcagaccactagggaagtacacacaatcccctcaggctctggcttctccctcaggcctttgctagggagatctcacctgctaaggccatggagagttcattgttaactaccctgtctttgaaatttctgatgtttcaacacatataacttattatttattaatataactgctcttgagccagtcttcattgaatattaagaatgacttaaggaaaggaatatttatcttttctaatactttctaaaagaagtaaagtagaatagtatagttgagtatacctgaataaaatttagcttcaaattaattattggtaacataactgaataataacaaaatttatcatgatgaccacctttaaaaatattttcataataatgtatctatatccagcattatctatacattaaccttagtcaaattgtcattgtttatactagagaagtgccgtagtgtagttttaaaaagaattgtgaatttatacctagaaaagtagtttaaaaacctgtctttgctgcttactaacattaaccttggaaagttacttagcctttctgacccttggtgaactaatcagtaaatgggaaaaataatacacagcccacatgcctgactgggttgtttagaagattaaattagatatgggtatgagagtgctttaaaaattgctgaaacatgtaattacaggttgagcatcccaaatttgaaaatctgtaattcaccatactccaaaatccgacatgatgcccaaaggaaatgctcattggaacatttttggatttcagatttttggattgagatgctcaactactaagtatataatggaaatattccaaaatccaaattctgaaacacttctggttccaaacatctaagataagggctattcagtgtgtactaatatacaatgttattgagtacttattgtatgccaaccactgttttgctcaactactttaacttcctctttctagggcaatgtgtcagtattccctgaagcccccttcaactcgtaaaatctactctgagtaagatcttttttaagtcttcgttttgcatagtggaatcaaggattaagaatcaaagaaaccatattaaataagtcaggattgaacaataatctctttttttaaaactggcaagtaataaatgtacatattcatggagtacctagtgatattttgatacatatactgtacagtgattagaacagtttaattagcatatccatcatctcgaacattttatcatttctttgtgttggaaacattgagtatccttcttctagctatttgaaactatgtattattgttaaccatggtagtcatcctatagtggtatagaacactagaacttactcctcctatctagctataattttgtatcttgtaacaaatctcagcttgtccctcattcccgtctacccttcccagcctccagtaccttctgttctactttctacttctatgaaatcaactgtttttagcttccacatatgagtgagaacatgcgatgtttaactttctgttgctggcttatttcaccagcatccatccatgttccatccatgttgccacaaatgacatgattttatttgtttttatggctgaatagtatttcatggtgtatatatacattttctttatccattcatctgtgaacactaatctctcttacaaccagctttgggatatcaatcgtataatacatactaaatttgagaaactgacctgaataattttctcgaatttttttgagaaataataacaactttctggaataattatcaatcacgtcatttttatctccagtagaaatttgtccccaggtattacctgatactttttaataatcagtatccatgattcttacttattttttaagtaaaaataataaaataataaagaagagttttagagaaatgcagacttttaatagttcaggatactctttccagaggtttctaacctcagcagttctttgcagatattttatttgtagattttaatgttgttttaattaagttactctttttagggaaaataatttataaaattttatttattttcaaatatgctgtttttaaataagcaagaccctgtgaatcagtttgaaagtgtaactttttattaaacatttaaatctattatttgatttgcttattaactcttcccttatatttgcttattcagtaatttagttacttgctacttacatttggtattaattcactaatttcagctaattaaaatcaaacgtacaataatatcctaattttcttgtaatagctactaaaatatagttataatagagaagtgtgttcaagtagttaaaaattaccacaagatttatgttcacaaattttcctatgagaatttttcgtctccaaacgttttgagagaaaaaataaatttttctgcttagtaaatttctcaaccttaaaacaagatgctggcctagggctaggagaggacttcttagttgaagctcctgcttctctggacaactttcctcttccttcttgcaaatgctttgcagagggacttgcacctctgctgctggacctggtcaggagcaagaggaaatttaaaacattcctcgggagtgcttgctcccagtggattgcatttgattgcgccttgtccttcgttgctttctttttgtgttgtttaattctgcttgttttttactgctatggatgttgcagatatctgtgaaattttactctattaggtcatcacctttagtaaatatttatccttgcataatttgagaaggtagacatgtttgttttgtaatattccccttagtaatatgagatagaagtacattggtaatggtagagatagatatttctaattaggtactaatgtttcttacagttttcagaataagtaaggaataatttttatgctatatattgccttccttttacagtgaagaagaactgttgtatctgagtttcattgaagatgtaacagatgaaattttgaaacttggtttattttcaaacaggttagtttttttaatggtgttatgttaattcaggagtacattaaatattcttcatatttcttcatatgatgttaaaattttaaagttattttcccatattaggaaatgaaaaaatatattgctttcttggaaacttattattataattgatagcaagttgtaaagaatgtttaattcatactctaggggaagttcaccacttgggagaattaaagaatagagcttttattcattttaatattatatcccttgagttataagtgactagtgaaggaagatctttatcacttatttgcaaagctccataatcccattttactacctaaaattgtcatgagaatcaaaagcaagcatttttggtgcaaccattattagtattagatctagtaaaatgagaacaaattaagagctaggtttgcacgctgtaagttaaatggaaagtttgcaaaaccagattagctattgcatagcttaaggaaactgtgtgtcctgaattttgcttgaacatttatgtatctaagattcattgagcactgagctctactttgtgttatgtaacctaggaccctattatgtatactacttgctttctctgtcataataatatgccaagcatagacatttttaataaattatttctatcctctacatcaagttttttaaaaaattaaagcaaacattttcattattggtataaaaaggcatatcaaaaagacctaagatttttggcattaattctgttgacccctttcattttaaaaagttggttaataatatttgcataatatgggtaaagagtttcaggatacataatgaaaagttttggcaatctgtatcacaatatgaatatacctaacactgctgaatcgtgcacttaaaaatggttaagatgataagtttggttagtttttgccaccacaagaaaaaaagtacacatacaaaatcatatgtatttatgcttaaaattttatgtttttctcaagattataagactgtttattacagcatttttataattgtaccaaaaaccagaatcaacctaaatgtttaatggtaaatgtttggttgaataaactgtggaatatatatgaaatgtgaggtctgtttagggattaaaaatgatgttgaagtgaatttacagatatagaaagatgttaaagatatatgtcattgattagaaaaaacaaaatagggctgggcgcagtggctcacaccagtaatcccagcactttgggaggctaaggtgggcggatcacaaggtcaggagttcaacaccagcctggccaatatggtgaaacctcatctctactaaaaatacaaaaattagctgggcgtggtggtgcgcgcctgtagtcccagctactcaggagggtgaggcaggagaatcgcttgaaccccgcaaggcggaggttgcagtgagctgagatcgcgccaccgcactccatcttgggcgacagagtgagactctgtctcagaaaaaaaaaaaaaaagaaaaagaaaaaagaaaaaacaagatagatacccaaatagtatgtattgtttaattacaagttggtaaagaaatacaaatgaatagaaaaaatgcctagtagtgaatattctaaaatgttaacaatagttgtaaaaagtagaatacagatttcttgggttttaataaaaaattgtgaaataattcagaactactaactctgaggttggttcataacttcactgatgctagcaaatgataacaaaggaaattagttgttttttaagaaactgttgatacattcctgtgatagagaggtgagcatggtgttctagaatgaagaaattctgtggagccagacacatctgggttaaattctcctaaaggcttttgacctcaggggagaggaaattatcatcttagagatgtggctttctcgtctttaaaatggtttttacactatctttccctccctacattggtcagaactagaggtaaaatgattattatgactagcacagtagcacttaatggaaattaataggtgataacttttaaattattatgtggatttaccatcagtgggagtttttaaattttttaattattttttaaaattttgtgaggtacacagtaggtatgtatatttaaggggtacatgagatgttttgatacaggcaagcattgtgaaataagaacgtcacggagagtggggtatccatcctctcaagcatttatcctttgagttacaaacgatcagattacattctctaagttattttaaatgtacaattaagttactattgactgtagtcaccctgttgtgctgtcaaatggtcttattcattctttctatgtttttgtacccattaactaccccacttaacctgcagccctctactacccttcccagcctctgttaaccatccttctactctctatgcccatgagttcaattgttttgatttttagatcccacaaatacgtgggagaatgcaatgtttgtctttctgtgccaggctcatttcacttaatataatgatctccagttccgtccatattgttgcagatgacaggatctcacttttttaatggctgaatagtactccatggtgtatatgtactacgtttttttatccattcatttgttaatggacacttagttgcttccaaatcttagctgtcataaacagtgctacgacaaacataagagtgcaggtatctcttcgatatcctgacttacttccttttgggattgctggaacatatggtagctcaatttctagttttttgagggacctccaaactgttctccatagtggttgaactaatagtttacattcttaccaacagtgtgcaaggattcccttttctccacatcctcaccagcatttattattgcttgtttttgcatataagccattttaactggagtgagatgatacctcattgtagttttgatttgcattcctctgatgatcagtgatgtgtggaataccttttcatattcctgtctacaattcgtatgtcttttgagaattgtctattcaaatcttttgcccattttttgattgggttattagatttttccctataaatctaatagtaaatagttgtttgagctccttatatattctggttattaattccttgtcagaggggtagtttgcaaatattttctcccattctgtggattgtctcttcactttgttggttatatcctttgctgtgtggaagctttttaatttgtgatcccatttgtccatgtttgctttggttgcctgtgcttgtgggatattactcaagaagtctttgccagaccagtgtcctagagattttccctcaatgttttcatttagtagttccatagtttcagaacttatatttaagcctttcatctattttgatttgatttttgtatgtggtgagagataggggtctagtttcattcttttgcatatgggtatccagttttcccattaccatttattgaagagactgccttttccccagtgtatgtatgttcttggcaactttgtcaaaaatgagttcactataggtgtgtggatttgtttctgagttctctattctgttccattggtctgtgtctgtttttatgcctgaccatgctgttttggttactgtagctctgtactgtaatttgaagtcaggtaacatgattccaccagttttgttctttttacttaggatagctttggctattctgggtcttttgtagtttcatgtacattttaggatttttttttctatttctgtgaataatgtcactggtattttgatagggattgcattgactctgtagattgctttgggtggtgtggacattttaacaatattgattcttccaatccatgaatttggaatatttttccttttttttttttggtgtccttttccattttgttcattggtgttttatactttaatataggaatttttaaaagtataatttaggaaggattataaaatatctctgtaagaggtttttctttagggtttggttgtgtgtgtgtgtgtgtgtgtaaatatcggggtagagaggctttgggtgtttgcatatgtctgtgagagaaaaacagctttttggtggtggggtgagaaaaaggagaattttattcaaagaaataaaagtagcatacagtctttcagaaatatgtaatgtgaagcaaatgcataatggaagaacttagaacaggaaaggattagtcttcagctttacagagaaaaagaaaaatctgaaaaacatttttcaacctttgtagtttcagtgttacgtagctagtttatatttagatgattttctgattttgagacattaacatttttgtttatcatttgtaggtttttagaacgactgttcgagcgacatataaaacaaaataaacatttggaggaggtttgtctttccttataacttcattagaaaaattataatgtaaaaataattgtatggtttttttcataccttcaaacaatacattaaaagcaagtgctttttttttcccttgaacttttttgagggtggtggtgggagaagtgaaaggaaaagtattaatcctgtgagattttcagcactgcagtcaaaatttaatttgactcaattaatgtaattagtctcatcttttcttaatcctaggaaaaaatgcgccacctgctgcatgtcctgaaagtagacttaggctgcacatcggaggaaaactcggtaaagcaaaatgatgttgatatgttgaatgtatttgattttgaaaaggctgggaattcagaaccaaatgaattaaaaaatgaaagtgaagtaacaattcagcaggaacgtcaacaataccaaaaggctttggatatgttattgtcggcaccaaaggatgagaacgagatattcccttcaccaactgaatttttcatgcctatttataaatcaaagcattcagaaggggttataattcaacaggtgaatgatgaaacaaatcttgaaacttcaactttggatgaaaatcatccaagtatttcagacagtttaacagatcgggaaacttctgtgaatgtcattgaaggtgatagtgaccctgaaaaggttgagatttcaaatggattatgtggtcttaacacatcaccctcccaatctgttcagttctccagtgtcaaaggcgacaataatcatgacatggagttatcaactcttaaaatcatggaaatgagcattgaggactgccctttggatgtttaatcttcattaataaatacctcaaatggccagtaactcaatattacttttcttccttttttaaaatgtatgtataagatttctctattggttttctgtgctgcaataataagttaccagaaacctagcggcctaatgtgccacacatttattatttatcccacagttttgtggatcaggagtgtaggcacagcttagttgggtcctctgtcctgggtctcacaaggctaccccacaatcaaggcagtggctggggccatgttttcattaagaggcttgttggcagaattatcctccttgcagttatagatttgagggcttcgttgtcttgctgaccagtggctagaggctgcctatagttctctgccacttggccctttccttagggaaattataacgtggctgcttgcttttttaaggatatcaggaaaaccagagagattctgctaacaagatggagtcttatataatgtaacataatcacaggagtgactttctatcacctttaccgtgttcttttgggtagaagcaagtcacaggtcttgcccacacttaagggttgggaatatatacaagggtgtgaatgccagaacacaggaatcactggggtcatctgaggacctgctggccacaatttctaaaatcacttttcagaggaaaacatattttacctatattttcagaggaacatattttacccagacataagcggttttgtaggctatgggaaatggtttatgatctggtgtgagtcttgaagcgttggaccttgtctgcaatatctttaattttgtttttctcacttttcctgcaatatctaaagcctcaaggacctttcagttgtcagtgacccagggaattctgtcagctggctgagatgttgtctcttgttgtgagtgcaaacatttagtcagacctgtctgaagccctctcctacccttgtagctcatgaatgagacccttactattagaacatggcccagcagattcatctctaattatacctttttaactatttacaataatataattgaatatttgtgtgcccattatgtacaaagtttcatgcctagatactgtggaggataaaaacaataacccattttgtttttataagctatattttaattttatatttaaaaaaatacaacccaggtattcttctaaaaacttaacagtgacttccaagtatcctgttctttaactcgggtttttatcatcctttggccatagcagtgtttcccaaagggtggtacttaccactggagacctgagagttgattttagtggtatgtggatgacaggtccatctcattcatgggatgctgaccatcaccactgtcttcaggataagacacaggtacaacctgcaaagcacaatatggtgggactgagcacccaacccacttttcacctccactgtcggaatccccaactcaccctgctacaacccttttttggcacaccttcccctcagccctcacctctggacttcttccctttaaccctgtaagcaacaccgtctatcccctcttgcagtcctcttaaacctcctgaaataaccttggctctattcttggtccccagcctgggtctccccatctgttagatctttacccctctagttgcttcttgggttctgttgttcctcagccccagggttcctttcttcagtcccagcctcactctttcacaaaccccctcttcccattccccatgtaactaccccagacctactggcctggcccaaattttccttccttggctggagctaccatctgtctttccggaggcattctcagaaactatctcctggctgctgttctccaacactttggtccaagccccagacctgccctatttgacattcagtcttcatgctctaactctgggtacagcttcttgtctctggggccatgacccatcctaatttggatacctattaggacaatttgttgttatcctttagtttccctttaagttttaaaaggtgagttgatttaaagaaatattaaaaatggttcttgaatgtggcaaaagtattatagtatgaaggtaggatgtgggtggtaagtttgggaaacagcacttaaactcttctagcagcatctttttttatccctaagacatcttgttacagcatcaagcaacatctttatatcttcccctcttccttctcacacagcccatcaactgaggctgagaggcatgatgaatgcgagtgtgtcttctgagccaggttgcctggatttgattccttttgagctgtgactttgagctgggttactgagcctgtgtgtgttttctcatatcttggagaggggtaattatagagcctttatcatagaatacaagaattaaatgagcttgcatgataaatacaggctgctgctacttttttttttgctatttattttttatttcagtaggattttgggaacaggtgatgtttggttacatgaataagttcttcattggtgacttctgagattttggtgcacccagcacctaagcagtgtacattgtacccaatgtgtagtcttttatccctcactccccgcctaccctttcccctcagcccccaaagtccattgtattattcttatgcctttgcatcctcatagcttagctcccacttatgagtgagaacatacaatgtttggttttccattcctgagttacttcacttagaataatggtctccaattccatctaggttgctgcaaatgccattatttcattcctttttatggctgagtagtattcaattgtgtgtgtgtgtgtgtatatatatacacacatcacattttcattatccacttgttgatcgatgggcatatgggctggttccatatttttgcaattgtgaattgtactcctataaacatgcgtgtgcaagttatcttttttgtataatgacttcttttcctctgggtagatacccaggagtgggattgctggatcaaatggtagatctacctttagttctttaaggaatctccacactgttttccatagtggttgcactagtatacattcccactaacagtgtaaaagtgttccctgttcaccacatccacaccaatatctactatttttttattttttgattatggccattcttggaacagtaaggtggtatcgcgttgtggttttgatttgcagttccttgataattagtgatgttgaacattttttcatatgtttattggctatttgtatatcttcttttgagaattgtctattcatgtccttagcccattgttgatgggattgtttttgtttcttgctgatttgtttgagttacttgtagattctggatattagtcctttgtcagatgtatagattgcaaagattttcttcactctgtgggttgtctgtttactgattatttcttttgctatgcagaatcattttagtttacctaagtatcatctgtttatctctgtttttgatgcatttgcgtttgggttcttggtcatgaacactttgcctaagccagtgtctagaaaggcttttctgatgttatattctagaatttttatagtttcaggtcttagatttaagtctttgatccatcttgagttgatttttccataaggtgagagatgaggatcgagtttcattcttctacacgtggcttaccaattgtcccagcaccatttgttgaatagctttgttgacagtcagctgactgcaaatatgtggctacatttctgggttgtttattccattcctttggtctatatgcctgtttgtttgtttgtttgtttgtttgtttgtttttgaggcagagtctcactctgtcacccaggctggagtgcagtggtgtgatctgggctcactgcaacttctgcctcctgggttcaagcgattctccgacctcagcctcccaagtagctgagattacaggcacctgccaccatgcccagctaatttttgtagttttagtttgtagtttgtaattttagtagagacggggtttcaccatgtgggccatgttggccaggctgtctcaaactccagcatagaaggtatgttccttctatgctgattttgctgagggttttaatcataaagggatgctggattttgtcaaatgctttatctggtctattcagatgatcatgtgatttttgtttttaattctgtttatgtggtatatcacatttattgattttcagatgttaaaccatccctgcagccctggtatgaaacccacttgatcgtgatggattatctttttgatatgctgttggattcggttagctaggatttcgttgaggatttttgcatctgtgttcatcagggatgttggtccatagttttgtttttttgatatgtcctttcctggttttggtattagggtgatcatggcttcatagaatgatttagggaggattccctctttatcttttggaatagtgtccataggattggtaccaattcttctttgaatgtctgatagaattcagctgtgaattcatctggtcctggaatttttggttttttgttagtaatttttttttttttttttttgagatagagtctcgctctgtcacctaggctggagtgcagtggtgcgatctcagctcactgctgcaacctctgcctcttggtttcaagcaactctcctgcctcagcctcccaagtagctggaattacaggtgcctgccactgcgcccagctaatttttgtatttttagtagagacatggtttcaccatgttggccagactggtcttgaactcctgacctcgtggtccacccgccttggcctcccaaagtgttgggattacaggcgtgagccactgtgcccagcctatttttgttggtaatttttaaattaccatttcaatctcactgctcgttattggtctgtttagagttttctgtttcttcctgtttaatctaggagggttgtatatttccaggaatgtatccatctcctctaggttttctagtttatgcatgtaaagctgttcatagtagccttgaatcatcttttttgtttctgtggtatcggttgtaatatgtcctgcttatttcttgtatttatttatttatttattattattatactttaagttttagggtacatgtgcacaatgtgcaggttagttacatatgtatacatgtgccatgctggtgcgctgcacccactaactggtcatctagcattaggtatatctcccaatgccatccctcccccgaccccacgaccccacaacagttcccagagtgtgatgttccctttcctgtgtccatgtgttctcattgttcaattcccacctatgagtgagaacatgtggtgtttggttttctgtccttgagatagtttgctcagaatgatggtttccagcttcatccatgttcccacaaaggacataaactcatccttttttatggctgcatagtattgcatggtgtgtatgtgccacattttcttaatccagtctatcattgatggacatttgggttggttccaagtctttgctattgtgaataatgccgcaataaacatacgtgtgcatgtgtctttatagcagcatgatttatagtcctttgggtatatacccagtaatgggatggctgggtcaaatggtatttctagttctagatccctgaggaatcgccacactgactttcacaatggttgaactagtttacagtcccaccaacagtgtaaaagtgttcctatttctccacatcctctccagcacctgttgtttcctgactttttaatgatcgccattctaactggtgtgagatggtatctcattgtggttttgatttgcatatctctgatggccagtgatggtgagcagtttttcatgtgttttttggctgcataaatgtcttcttttgagaagtgtctgttcatgtcctttgcccactttttaatggggttgtttgtttttttcttgtaaatttgtttgagttcgttgtagattctggatattagccctttgtcagatgagtaggttgtgaaaattttctcccattttttaggttgcctgttcactctgatggtagtttcttttgctgtgcagaagctctttagtttaattagatcccatttgtcaattttggcttttgttgccattgcttttggtgttttagacatgaagtccttgcccatgcctatgtcctgaatggtaatgcctaggttttcttctagggtttttatggttttaggtctaacgtttaagtctttaatccatcctgaactgattttcgtataaggtgtaaggaagggatccagtttcagctttctacatatggctagccagttttcccagcaccatttattaaatagggaatcctttccccattgcttgttttcctcaggtttgtcaaagatcagatagttgtagatatgcggcgttatttctgaggcctctgttctgttccattgatctatatctctgttttggtaccagtaccatgctgtttttgttactgtagccttgtagtatagtatgaagtcaggtagtgtgatgcctccagctttgttcttttggcttaggattgacttggcgatgcaggctcttttttggttccatatgaactttaaagtagttttttccagttctgtgaagaaagtcattggtagcttgatggggatggcattgaatctgtaaattaccttgggcagtatggccattttcacaatattgattcttcctacccatgagcatggaatgttcttccacttgtttgtatcctcttttatttccttgagcagtggtttgtagttctccttgaagaggtccttcacatcccttgtaagttggattcctaggtattttattctctttgaagcaattgtgaatgggagttcactcatgatttggctctctgtttgtctgttgttggtgtataagaatgcttgtgatttttgtacattgattttgtatccagagactttgctgaagttgcttatcagcttaaggagattttgggctgagacaatggggttttctagatatacaatcatgtcatctgcaaacagggacagtttgacttcctcttttcctaactgaataccctttatttccttctcctgcccaattgccctggccagaacttccaacactgtgttgaataggagtggtgagagagggcatccctgtcttgtgccagttttcaaagggaatgcttccagtttttgcccattcagtatgatattggctgtgggtttgtcatagatagctcttattattttgaaatacgtcccatcaatacctaatttattgagagtttttagtatgaaaggttgttgaattttgtcaaaggccttttctgcatctattgagataatcatgtgttttttgtctttggttctgtttatatgctggattacctttattgatttgcgtatattgaaccagccttgcatcccagggatgaagcccacttgatcatggtggataagctttttgatgtgctgctggattcggtttgccagtattttattgaggatttttgtatcaatgttcatcaaggatattggtctaaaattctcttttttggttgtatctctgtccggctttggtatcaggatgatgctggcctcataaaatgagttagggaggattccctctttttctatggattggaatagtttcagaaggaatggtaccagttcctccttgtacctctggtagaattcggctgtgaatccatctggtcctggactctttggttggtaagctattgattattgccacaatttcagatcctgttattggtctattcagagattcaacttttcctggtttagtcttgggagggtgtatgtgtccaggaatttatccatttcttctagattttctagtttatttgcatagaggtgtttgtagtattctctgatggtagtttgtatttctgtgggatcggtggtgatatcccctttatcattttttattgcatctatttgattcttctctctttttttgtttattagtcttgctagcagtctatcaattttgttgatcctttcaaaaaaccagctcctggattaattaattttttgaagggttttttgtgtctctatttccttcagttctgctctgattttagttatttcttgccttctgctagcttttgaatgtgtttgctcttgcttttctagttcttttaattgtgatgttagggtgtcagttttggatctttcctgctttctcttgtgggcatttagtgctataaatttccctctacacactgctttggatgcgtcccagagattctggtatgtggtgtctttgttctcgttggtttcaaagaacatctttatttctgccttcgttttgttatgtacccagtagtcattcaggagcaggttgttcagtttccatgtagttgagcggttttgagtgagattcttaatcctgagttctagtttgattgcactgtggtctgagagatagtttgttataatttctgttcttttacatttgttgaggagagctttacttccaagtatgtggtcaattttggaataggtgtggtgtggtgctgaaaaaaatgtacattctgttgatttggggtgaagagttctgtagatgtctattatgtctgcttggtgcagagctgagttcaattcctgggtatccttgttgactttctgtctcgttgatgtgtctaatgttgacagtggggtgttaaagtctcccattattaatgtgtgggagtctaagtctctttgtaggtcactcaggacttgctttatgaatctgggtgctcctgtattgggtgcatatatatttaggatagttagctcttcttgttgaattgatccctttaccattatgtaatggccttctttgtctcttttgatgtttgttggtttaaagtctgttttatcagagactaggattgcaacccctgcctttttttgttttccatttgcttggtagatcttcctccatccttttattttgagcctatgtgtgtctctgcacgtgagatgggtttcctgaatacagcacactgatgggtcttgactctttatccaatttgccagtctgtatattttaattggagcatttagtccatttacatttaaagttaatattgtaatgtgtgaatttgatcctgtcattatgatgttagctggttattttgctcattagttgatgtagtttcttcgtagtctcgatggtctttacattttggcatgattttgcagcggctggtaccggttgttcctttccatgtttagcgcttccttcaggagctcttttagggcaggcctggtggtgacaaaatctctcagcatttgcttgtctgtaaaggattttatttctccttcacttctgaagcttagtttggctggatatgaaattctgggttgaaaattcttttctttaagaatgtcgaatattggcccccactctcttctggcttgtagagtttctgccgagagatccgctgttagtctgatgggtttccctttgagggtaacccgacctttctctctggctgcccttaacattttttccttcatttcaactttggtgaatctgacaattatgtgtcttggagttgctcttctcgaggagtatctttgtggcgttctctgtatttcctgaatctgaacgttggcctgctttgctagattggggaagttctcctggataatatcttgcagagtgttttccaacttggttccattctccccgtcactttcaggtacaccaatcagacgtagatttggtcttttcacatagtcccatatttcttggaggctttgctcgtttctttttattcttttttctctaaacttcccttcccgcttcatttcattcatttcatcttccatcgctgataccctttcttccagttgatcgcattggctcctgaggcttctgcattcttcacatagttctcgagccttggttttcagctccatcagctcctttaagtacttctctgtattggttattctagttatacattcttctaaacttttttcaaagttttcaacttctttgcctttggtttgaatgtcctcccgtagctcggagtaatttgatc

SEQ ID NO: 381 - DNA, 73004 bp, Homo sapiens
caggcacatgccaccatgcctgagtaattttgtatttttagtagaaacagggtttcagcatattggccaggctggtctcgaactcctgaccccaggtgatctacctgcctcagcctcccaaagtgctgggattacaggtgtgagccaccgcacccagcccactactagagagttttaagcaagaatgtgaaaccatctgttctgtgtgttattgttgttgtttgagacagggtctggctctgtcaccccagctggagtgcagtggcaccatctcagctcactgaaacctctgcctccctgcaacctctgcctcccaggctcaagccatcctcccacctcagctcagcttcctgagtagttgagactacaggcatgccccactacacctggctaatttttgtattttttgtagagatgggatttcgccatgttgcccaggctggtctcaaactcctgacctcaagtgatccactcacctcagcctcccaaagcgctgggattacaggcatgagccactgcgcccggcctgttttgtgttttaaaatgatccctctggctactgtctggagacaaactggaggacgataagagtggaggtaggagagaactgaaagctcactatttgctggtggctatggacaagtcagtcaagtcatgcacctcaccttcctcattctagtaatggaactaatccctaactggtgggataggggtacaaggattccatgaggtgatgtgcacccagtgcactgtaggtactcactccaagttatttctattccttttccaccttgaccagggctgagaccctcttccatcccatagctccctcctctgagtgttattagctgtgaacccaggtccctaaatggcctaaaggtcctaggtgtttgtgaacagtaaagaaatagtctttactttaccttgacctcatgctgtactcacaatatgttttttaaagtttattcattcaatttttttagtacctgctactatgcactaggactataacccctttaaaagtctatgtgataatattaaaaactgaccattttattgttctgtttaaaatacgtggttcactgatgccaacataataaacatctaagctccttgtggtgtttaaagaccttcatgatccacagtcccatcttttgtgtaaataagaaaccaaatatatagataaaatgatgatatatgcaagaaatgtttataaattattacagaagttactcttgggaaaggatactgaagatgggaatgagatggggtgggagtttttttggtttgaaatttttaccacttatatctatttcctttttagaaatcaatacataaaccgggagtgctcgtgcatgcctgtaagcccagctattcagaaggctgaggcaggagatcacttgagtctagaagttcaaagctgcagtatgattgcaatatgaatagccactgcactccaggctgggcaacatagatagaccctgtctctaaaaaaaattaacacatatattttgaaatgaaaaggaaaaattacagggagataggaatgggaaaggggacttttttattcttcctcactattgctttttttttttttatcatgaacatgtaatttttgtttttgtttttgtttttgagacagagtctcactctgtcgcccaggctggagtgcagtggcgcaatctcggctcactgcaacctccatctcccaggttcaagtgattctcctgcctcagtctcctgagtagctgggattacaggcacatgccaccacgcctagctaattttttatatttttagtagaggcagggtctcaccatgttggccagtctggtcttgaactcctgacctcaggtgatctgcctgcctcagcctcccaaagtgttgggattacaggcataagccaccgcaccctgctgtttttaaactttattttcaaaaaaaggttatcttctgagactctccctcacttcataatgcttgcctctaaccctcaacatcagcatcacagagtctgtaaataaaactggaattcatccaaacaaacagacgttaaacacccactgtaggcacagaactctccttggcccctagaaatgtcttgttgttgttgttgttgttgttgctgttgctgttgttgttaatagagacaaggtcttgctatgttccccaggctgttctcaaactcctgagctcaaacaatcatcccgcctcagcctcccaaagtgttgggattacaggcgtgagccacagcacccggcattagaagtttcaaaagaagtgtgggaaagggttttgaacttatatttattgatgctgactacatattaagcattttacatatattcctttattgaagtgttcccaagactttatgaaataagtcccactctcgccactttacagatgagaaaactaagaccaagaaaggtgatattgcccatctcaggtcataaaatgagtaagtgggccaggtttggtggctcacgtctgtaatctcagcactttgggaggccgaggtgggaggattgtttgagcccaggtattcaagaccagcctgggcaacatagcaagactcctgtctctacaaaaaaatttttttaattagccaggaatggtggtgtgcacctgttgtcccaactactcgaaaggctgaggtaagagcatcacttcagcctggtagttcgaggctgcagtgagccactgcccaccagcctgggcgacagggtgaaaccctatctcaaaaaatttaaagtaaaatataaaataaaataaaatgaataagtggcaggaccaagagtctgtgtaactagaaagcctccttcccattgctccacatggcatcaagagccatttctaccctcagaaaccaaccttacaagctaatttttgttgctatttcttggtacttattgctttgtttttgagagataatcttcctgccaggctggaatgcagtggcgcaatctcggctcactgcaacctccgcctttgggttcaagcatttctcatgcctcagcctcccaagaagctggaattataggcatgcaccaccatgcccagctaatttttgtatttttagtagagatggggcttcaccatgttggccatgaggctggtctcaaactcctggcctcaagcaatccgcccgccttggcctcccaaagtgttggcattacaggcgtgagccactgtgcccggccctaggtatggtttaatttgttttctccagtcagatataaggatccaggaggtaaaggtgacatgtccctatcatagctattcaagactctctactccaccagtccatcataaagttattgatttatacaataaaaatatttactgagtacctactatgtgcactgtggaacagctagggcaataacagtgttgattttactgatagggaagagcaacagcaggatactggaaaaagattaatttgcaaccagaaggaataagtcttttgggagaaagatgacaagttcaattttggttattataaatttgtgggacaccataagaagctgtctggaggcagttggcctagtagatatctaatttttaccttcagggctcatccctggtatctgcttggataccacttctcattcaattttcttttaaggaacattctctctcctctctcagccaactccctcatccctgaccaaagtatataactcagacttggccagtcagaacaggtacctctgtgcagtaacaggcaatgtgaacaaagccaggccaataagacccaaactttgttattttgctggaactactgggaaagagaaaggctcctctttctattacacttaagttgctaagttggtaggatgtaagcctgtagctgctgggggcatcttgcccctaataaaatgggaggccttctgccaatgaagcccaccaaaagaaggcagagcaaaagatggagaaaagtccattcctttttaggtaccttaatccagctatgcctgaaaccccatatccctggacttttcagttatgctacccagtaaaattctctttttggatgtagctcagttaaactgggtttataacaaaataatcctgaacaaaattgattatacaagtccagagtttaggagagtgatcttggctagaggctagggtcatccctggcttgttgtttattcccttaaggggagaatcactaaaataaataaataaataaatatatatatatataaaattttgaaacagtgtctcactctgttgcccaggctggagtacagtggtataatctcagctcactgcagcctcaaccttcagggctcaagccatctgcccacctcagcctcccgagtagctgggactacagacaggcatgcaccaccacacctggctaatttttgtattttttctagagacagggtttcaccatgttgccccggctggttctgaattcctgagctcaagcaatctgcccaccttagcctcccaaaatgctgggattacaggtgtatgccactatgcccggcagaatcaccaaagatgtctgaaccagggagtgacatgaccagaagcgatggatggattggggtggggactgggcaagagggaggaggcaggaggagtagctagaagcctataaataatattgataagagaggttggtggcttagtctacagtggtgatgacagggatgatgagtaggaatttggaagatacttaggaggggtgcagagagcacttgatcaccatttggaaatgagaagaaaaggaggagtccagcatgccattcattattgggagactgggtgactggcagtgtcattaatggagaatggcagtggaggaagagcaggtgcatggggaagggatatgatgagttcaaaatagaacatgctatagatgaggcacttgcaggacatctggagacacaggcctgggagagaaaggaacacaagggcttggagctcagaagaaagaaagtatttcccaaccttggaatgatcactgtctagctctctttcccacagagcctgatgtggggtgcctggcacttgggtttagggaatggcaggctagaggctagctgggcacaaccaaggtcctggctaagaggatggtgctgtgccactagatggtaccaccaggttgagaacacaggaggccatgtcagcctgtagtctggtccaggtgaaccgaggaagccttggggcttggaagtaggattgggagatatggcattcaaatgattacactgaaatgatggcaacacacaaacctgacacataaatttggcataaggtataaactcccagaagctcagatgactaggatctctgctggatttccatacaggggtgagggcagagcctgtattgaacttcccaaaatactccctgaggttttggaacttgctctctcctaccattctttcatcctctctcctaccattctttcatcctgagatcttctctctcatgcatttattcattcaacaattattgagtgcccaataaataaatagagatgagggttttttttgttgttgttgtttgtttgtttttttgagacagagtctcactctgttgcccaggctggagtgcaatggcgcgatcttcgctcactgcaacctctgcctcagcctcctgagtagctggggttacagacacctgccaccaggcctggctaattttttttttttgtatttttagtagagatggggttttgtcatgttggccaggctgtttttgaactcctgacctcaggtgatccacccgcctcagcatcccaaagtgctgggattacaggtgtgagccaccacaccggccagtgtattttgttttgttttttgttttttgtttctttttgagactgagtctcactctgtcacccaggctggagtgcagtggagtgatctcggctcactgtaacctctgcctccccagttcgagtgattctcctgcctcagcctcccgagtagctaggattacaggcacccaccaccatgcccagctaatttttgtatttttagtagagatggggtttcaccatgttggccaggcaggtcttgaactcctgacctcaagtgatccacccacctcaggcatgagccaccgcgcccggcctatggataaggtcttgatgctggagaaaggagagtgaacaaaacaatcatgatccctgccctcatggggcttacagacagggagtaatcagataattgcacaaataaataatcatagattttggtaaatgctaagacatttacagagggccagaagaaaacatgtcaggcagttccaatctctaggtcaagagagacaggcattctctgttgagctggaagaggaaactaaggcccaggacagggtaggtgtgcctgttgtcgcttggtgagtcagggctgtattaggaccagaagtctcactcctgactactgaataaaaggcctagcttcaggctgatatccatcatgacacatcttcccactcctctccctgctacctcctgattccactccctttggaaaataagttttgatccgcagccctgacatttgacgcccataaacctctaaactccatcttcattatctcctcacccccaccccatacagagtgcagtccagtcaggttggcaagggctgctggtcagggccagatgaccagaaagtgtagaggaggagagaatttggggctttcaggctgggagcagctagggaagggccaagccggaaaagcagcatctgccaggctggtaagagacaaggctcaagtgcaggcactgcgaggaagcgagagtgaggtagaaggatgctctaatgccaggaagtgacgtgcagggacagagggatgggggatgaaggatgaagaatggaggggaggatgaagctgggccacatggctaggaggaagagcagcagggaaggaatgcacagagagctctttgcccccaggtctcttccaatccctgtctcctccttctcttacccccacttctcacaattccagcagagggctgaggggaacacagtaaaattctggagactgcttcctagggagcagagtaccttactaataccccggccagatccatggctcagggaggggtggggtaatccacaggagagtgaaggcgttctagtccccaaggacttttgagaggtcatgcagtccatgcctccgtctcccaacacccaacagaggggaatcatattctctttacccctccctagacatgaagagattctccgcttctcccagaccctctgcttctcacaatccctggctgtggggaacttctcttaaggcacagattggatccctcttgctgcagtctctgacttggtttctcctatcctgtcctctgtggctagagaaagccctcttctgggtgatcacagcggttccttaggatctccccttcaacattccttcatcgttagttggttcttcccagaaggtaagcccaatcccttctactgcagtccctagcatcctctccgttgtcgcatcctacgcctccaaggcagaaatgcacccccttcctcaccaaataattaacagagacaagggagaagaagggagagatccaagaagatggggatgaattaaggagatggagctggaggtggatgcttgacacagaagaaggaagaccggggacttcccaaggcagggcagggacggggtcagcgggcctcaccggtgtcggggtctcccagaaaggcgtcctcgtccttgcggcccctcagcggggccgcgggcgccggctcgtcctcgggcagccgcgggaagctggtgatgctcatgtagtccactggcgagtaggcgcccagggcgctctcctggctggcctcgttctccgccgccatcctcgcccgcgccccccagcagcgcagcgcctgccggaagtggctgcggcgggggagtgggagggcggagggcggggcctgatcttcgcgacagccgggagggggcgcctctcccagccctcggccgtgtcccggtctgactcgcccccgtctgctcagcgctatcagcctgcagctggcacacaggtgcgtgtagatggacagccaggaaggcagcgcagggtcgaggggagagcgcggggcaagcgagacttcagtggctctgcactttacgcagctcagggaccaaaccccttcctccttccagcctgaatacagctagtgtcctcctcaaatcccaggcttccttttcgggccccagaccctttcactgaccgcaaatccctctcgaccccagatcctgtctctgaccccaaactcctcggaccccagacccctccttgaattccgagatcctcctcctccgattttagactcctcctccgaccttagacctctttttcgacttcagactctgtcttcacccccaaacccttttgaaaaccccagcccatgcttcatctccaggcctctttgactgcagacgcctctttggacaacagatccctcctctgacctcagatcccttcccgcaccccgacacttctgactcctctttcaaccgcattctcaaactttagtgtgtgttaggatctttgaaagcggatccccagattccactccagagatcatgattcagtaggctgggatgaggtccttggaacctgaatatttaccatcattttaagagtttttgatgtggttctggaaaggacactttgagaaagaaggagtggtggtagtgatggtagggcaggagtggggcaaggtggggaataggtctccatattctggatgtctgggttctattctgccaccgctcaaacactgtgtaatcttgggcaagacaattagtctctctatcagtttccccatctgtgaaatggaaagaataatagtacccattttagagggttgtcatgaggattaagtaacagaatggaaagcgattagtatagggcttggcacctactcaataaatggcatcatcatcatcatcatcattgccttaatctggtagattcattccctccaaactcatccatcctctctccactccaaaattccaaccacactacagcttgtactacttctccatatccaaggatgagggaggttccttcttttacgaggtctctgttccaaactttcattgtgaagtccacaggaagagaggggggctggtgaagcctctatacacacatcctttctcttcccaaccccagaccagtctcagggatggcctgaagtgcttgaaaaatctactatatacacagcagctgcagtagcaactatagacaggagggggaagcagtgtgtcgggaacagctctggggtttgggtgtaggacttgggagagaggataggaaggagagggctactcagagctgtgtggtaagagtgcccagggagggtaacagtctatcaccaaaaagtgtacccattgtctgtgcctttccccaccccagagagttcttatctcctcagtgatgtttgtagggtctattacactaccctgaggtctaatccctctggtgggacccttccccacttgatgaggtctgcaccttctcagtgatgtccactcccacagtgtagttggcagctcctcactggagtttgagtcctctggtagggtccacgtctccttagtaaagtctatatcctctgtatctcttaggggaaatccatgtctcctcactagggtaagtgcccttcaaagccattcatgtcctattagcagggcccagggcccttcagtcagatctgagaacccccagcaacatctgtgctcccttagtggagtccatgtactgtcagtgaagtgtgtgtcccttcggtgcagtgaatatctcctttatgaaagtatctgaccccttggtggggtctatgtccaccccaagaggtctgtactccttcagtgggccctcagattcccgccctccttgggattgggcagactctcggtctcccatagagagattttttttcagcttagggtgtgcaaggtttacagtcagctgggcaaagtgcagggaagtagctgggaagggaggctgggctagatggggtcacaaggcctgtgtaggcttcaggaggtgggagctgcccgcttcaggcctcagaatcactcttggagttagatatttaagaatccttcctgccttgacagccagtctgtgaaatgatggtgaggtgggcacttctttgtggtgagtgcaggtgagagatggaggagggtcctgcctgacttctttctggggtggaggggctagagagaagctagaggtaattaagcccaggttgtggtggtggtggtgggggtttcccttggtggagtaaagagattgtgaaggaaagaagagaatgtgggccaggtgtggtggctcacgcctgtaatcctagcactttgggagcccaaggcgggcagatcacctgaggtcaggagttcaagaccagcctggacaacatggtgaaatcccatctctactaaaaatacaaaaattagctgggtgtggtggtgtgcacctgtaattccagctactcgggaggctgaggcaggagaattgcttgaatccaggaggcagaggttgcagtcagccgagattgtgccattgcactccagcctgggcgacagagcgagagactccatctcaaaacaaaaacaacaacaaaaaaagagaatgtgaatgatttttcctatttgcacagactttgatattttacaagccttagcttcaagcctgacgaggaagtaaaaccaaatctggagtcaaagaacctagctttggccctaacttggtcgttatttgctctctgactgtgcaccagttccttccctttcctgggtttgccatttgtgcaattaggaggtgggcttattacaaaaaacctgaaggtgtctcctagtcttcacttattgagtcttgtactttagatctggatggagatttgtgaaggcaaggagattgaagacatgtcctcataagagggagaaaatctgagctggttccagggtgagcagagaggaggtgctgtcgccagagcatgccctcaaggtcatgggagaagtttttccggaggacgagaatgtgggtgtggctcagagaggggggacctggagggaagggtgtcacctggaaggaactggtgatagtcaggactgtgcaatcagatcacggggcggctccgcgatggaccttactcaactcctctccttagtccatccctttccctttcgatccttgccttaacccaaccccttatctgtcactccaagaccccaccccactctggtcactccatggctctgcctcctctcctgtcacaaccagccgggttactccccatcactccatgggcccacctcctctcctgtcccgcctggccccgcccctcccttggcactccacggttccaccctctcccttgtcacacccggccccgccccttctgctttcactcgacggcgtcactccttccggcaagtcagctccacccctatccctcgacttttccttatagtatttctgtccttgccaacctcgatccctccccaaccagacacggccccgccccctctggcaccgcccacccgccagactaagccactcccccactcaccaggccccgcccctctacggaggccccgcctctagttcggcctgttttctcagtcccggcacccgccgcgaccgcaaaggcggccgcggttctaggaacttgacgtgatggggcttcctgaggagcgggtccggagcggcagcgggagccggggccaggaggaagctggagccggaggccgggcgcggagttggtctccgccgcccgaggtcagccgctccgcgcacgtcccctcgctgcagcgctaccgcgagctgcaccggcgctccgtggaggagccgcggggtgaggcccggcccgggcgggcctggggtgtcagtgaggagaagagtgggggctccctgggggagtcgggggctcccttgggaagctgaggggtgggtgaggagatggaggttctgtgaaggaagaattgcggttctttgaaaatggaaaagggattccgggaggagacgagggttccatgggagctggggagttccctgcagacttggagggtccgtggtggagatgcgggtttttgcgaggagacgcgggattccgtgagggaagaagtgaggttccttgagattgggacggggaggtcggccaagagagtgaaagtttcatgggaagagaaggggagttcctgaggcgaaaagagggtctctaaggggcgacgggagccttgaagggaggagggccacgaatagaactttctttgcttccctttcacaccagctcagccactgcctcctgagacccttaacctgtgaactgttgagggcaataacgggtctggttcccatcttggggtcctcagattagtaatggagtccccgatctatttttagtatatcggacatcctaatggaaattacgcggtataagactgaacgagttactacgatgtcaagttgttttatttatttttttaacttgggctgggattgtattagtaatagttcagaagttctgatagatggttccatgtctgttaaaatgtatgaggaaaatcggccaggagcagtggctcacgcctgtaatcccagcactttgggaggccgaggcgggcggatcacttgaggtcaggagttcgagaccagcctggccaacatggtgaaacccccgtctccactaaaaatacaaaaattagccgggtgtggtggcgggcacctgtaatcccagctactcgagaggctgagacaggagaattgcttgaacccaggaggcagaggttgcagtgagccacgatagcaccactgcactccagcctgggcgacagagcaagactttgtctcaaaaaaaaaaaaaaaaaaaaaaaaaaaaaaaggtataaggaaaatccccctacccttgccctcagtctgggtaaaggacagatagatagacagatagatagatagatagatagatagatagatagtttgttttgagacaaggtgttgctctgtcacccatgctggagtgcagtggcccgttctaggctcactatagcctgcatctcctgggctcatgcgatctttccgcttcagcctcctgggtagctgggactacaggcggacgccatgacacccagctacttttttgtattttttggagagacgaggttttgccatgttgcccaggctggtcttgaactcctggcctcaggctttcctccttacttggcctcccaaagtgctgtgattacatgtgcatgagctactgcgcctagccaaggagtcaaaattgcacccccattgggaggcagcatgatgtttggttgtgggacaaacatgggccacgaatcaaatccagaaaaatctagatttagaccctggctctgctgttcatttactgtggggtcttaggcaaatttttaagcctgtctgagattccttttcttccatctataagataggtctagtaatacttgcctaatgggtttgtatgaggtctaaagtgtgtaataagtatgcgctataacatgcctgatgcacagtacacattcaataaatagtagttagtctgatacaatataaatcaagcaattaccaagtaatgcaagacaggattcaatcaagtgtaaagtggtggagttgggatttgaaccaagacagtttgactgcagaatccatatcctaatagcaatgctattcctcttccatgaccccacagaatgcatttcaccaaattccatcaaatacagaatttctaccagggaagcagcctcctaatttgtcctctcttgcctagtttcgccaacttgagtctttccagtagatttatcaagacaccattagattgatattatggaaatatgctttcatatgtcactgcaaaaactttcaatggttccctgtttctggcagtttctaattaaaattctgcttttcttttttttttttttttcttttttttttgagacggagtctcgctctgtcgcccaggctggagtgcagtggcgcgatctcggctcactgcaagctccgcctcccgggttcacgccattctcctgcctcagcctcccgagtagctgggactacaggcgcccgctaccacgcccggctaattttttgtatttttagtagagacgggctttcaccgtgttagccaggatggtctcgatctcctgacctcgtgatccgcccgcctcggcctcccaaagtgctgggattacaggcgtgagccaccgcgcccggcctctgcttttcttttaagacctccagataatctagctccaccctgcctctctattcttatctcccactacttgctaccactcccctcattctagatagatcattctccttgatatcctggatacacatttattcccaccttcttgcctttgttcatttccttctgcttctctctacctagtcaaactccaccacttccaatagagcattcactgatcatcccaatttatgctcacctttttcctcttctgaatatctttagtacttagaaactatgccactcatccagattctgacacacacacacacacacacacacacacacacccctaccccccccaaaaaaacccagaaaaactaagtgtgcataaaattcagttttgtagccaaacatggtgacgcacgtctgtaatcctgctactcaggaggctaaggcacgagaattgcttgaacccgggagacggagattgcagtgagccaagattgtgccactgcactccagcctgggcgacacagcgataccctgtctcaaaacaaaaacaaaaacacctcagctttcttcattctttgttgatggacataaatgtggtttataaatagttttatatactatatgcctactattatcacttgaaaatatttttgagtatttgtactctcgttattagctgcgtggtccttggcagagtttcctgtgcttcctgagcttcagttttctcatctataaaattaggataattaatgtatactttgtaagaccataatgtcataaagattaaatgagattagtccagtccctgatacatgaatggcatttactaaatactagctctcatttgctttctctttaatggccatttattattctatggtattactacttgtattactagttttcatcagtttgttattgttgggctattgggttgtttccagtttcactattatagtgttgctataaacatctctttactaatcactttttttctttgtgattattttcttgaagtctattccctatagttgagatagcagagaaaagggtataaaaagttttatgggctgggcgtggtggcccacacctataatcccagcatcctttgggagggcaaggtgggctcccaaagcttgagcttaggagtttaagaacagcctgggtaatatggccaaaccctgtttctacaaaacaaacaaacaatgtgcgcctgtagttccagctactggtgggggagggggtacagctgagatggggggatcacttgagccagggagatggaggttacagtgagctgagatcatgctactgcactccagcctgggtgacaaagagcgagacaccgagctaaaaaaataataataatagaaattaaaaaaaaaaagttttatggctcttgtcatgcattgccttgcaatctaataagactgcgccaatttcttacaatgccattattgtgtaagagtatctgttttcccagggccacccagacattgggcttaataatttttttaaatttttactagttttctaggtatataatggcaccttggggttgatttaatttggatttctttaatacattacaacgttgtacactatgtgatttagctttcaattatattctgtcttgtacattaaaaaatatttcatgtgttaatcttatctctccaactagattgtataagctctaaattgtgtaacctgaaacaaatgacttagcttctatgaattttatttcttatgaaatgaaatgagggggtgataatctgtaaggttacttccattgttacggttctaattgcttctctttcctccaaatttttttttttttttttttttttttttgagatagagtcttgttctgttgcctaggctggagtacagtggtgcaatctcaactcactgcaacctccacctcccaggttcaggcgattctcctgcctcacgctcctgagtagctaggaatacaagcacccgctaccacacctggcaattttttttttttttttgtatttttagtagagacaggatttcaccatgttggtcaggctggtctcgaactcctgatttcaggtgatccgcccgccttggcctcccaaagtgctaggattacaggagtgagccacagtgcctggcatcctctaactcttgattcagtactcagactatcctaaattctctgcattcatatgttttacctgttgagtacattttctgcagaatagccaggcagatattttaagaatgtaaatttgatcatgttacttgcttaaaacccttcaatgaattttcattgctcttgggatatataccaaattccttattatacacagaattgcatgatttgcccagtttatgcatcaattcctgctattctttcccttattctcagtgtttcagcctcaaggagttcctcctaacatatgcccttggtctctttttttcatatgggagtggagaaaaacttctattcatctttcagattttagcaaaaatgtctcaaggaagtttagatcttgacttagtaattgtgtaaccttagacaagttatttaacctctctgagccttgattttcaagtttataaaatgagaaaagcctcccttctagagttgtggtaaggattaaatgagataatacatatgaaaagcttaaagaaacatttggcacatagtgaataacacttatataagtagaagctggagaaggagatgctcaatatataattgctgagagagaatgcacgaattaagagaagaaagagttggtcatggaaggttctgtgggtgaagaattttttctttttactaattacttcattaaaaaatttactttctagttagacagatggtgaaaaaaattgtacctgatttcagcagaactcggtgtgtacctataatcccagcttcttgggaggctgaggcaggaggacagctgagtccaggagtttaagacaagcctgggcaacagcaacaaaaaattactgattgcctattttgtgctaggcattgtgctagtactaggtggctctgattttaatagatggtaaaaagtgagtaggcagtcttgaggacaggaggaagaatttgagtcaagattcagcccaagagaatagaagatgggttagaagagtgttggctgctggccgggcgcggtggctcaagcctgtaatcccagcactttgggagtccgaggcgggcggatcacgaggtcaggagttcgagaccagcctggccaacatagtgaaaccccgtctctactaaaaatacaaaaattagccaggcgtggtggcacgcgcctgtagtcccagctactcgggaggctgaggcaggagaattgcttcaaccggggaggcagaggttgtggtgagccgagatcatgccactgcactccagcctaggtgtcacagtgagcctccatctccaaaaaaaaaaaagtggtgggtgctaagattagacaggtaaagaagggacccaggtggtgggtcctagggcaaggaagttataatttggtcctgtgtatagactggtaagccttctgaggctaaatatgtctcagaagattaatgatatctgggcttccatttctgttgcagaattctggggagacattgccaaggaattttactggaagactccatgccctggcccattccttcggtacaactttgatgtgactaaagggaaaatcttcattgagtggatgaaaggagcaactaccaacatctgctacaatgtactggatcgaaatgtccatgagaaaaagcttggagataaagttgctttttactggtaaaaatatctatcttatacttggtggcagataaaaacactcatttgatacttacaacaacccagtagagtaagcaaagtgtcatcaacttaatgcctcaggtgaggaaaaatacctcaaggaagctacatgacttccttcagatcacataactagtatgtgacagagctgacattcaaagccaagtgtcctgacttctagtctagtgttcttggctttgtagttgaagagggagaaagggcattggcaaatggaagagaacaagactgagtagctttcttcctcattcttgctttggaagacaaatagtattgggtttttcaccaccactactaccactaccattatcattatcttttacagagctgtgtgccagaaactatgcttaagtgcttaacaaatactatctcctttgatgcttataataattatgaaagcactatttgttttcctcattttacataggtgaaaactgaaattctgagaagtcaagtgacatatctgaagtgaaacaactagctagaagcaaggctgagattcaaacctaggcagtataattacagagcttacacacaaccatgacactctattattcctctaattccttaccttggcctctcaacaggtttgtaaaataggaattcttagtttcattttataggtgaacaaatgaagcattgaagggttatgtagtgaataaggtcatagagtgaataagtggtagagccaggattcaaattcaagtctgcctgactccttgcttgtaccactaggccatgcagcctccccagcaggaaatttctaagactgcttctcccaggaatttagctgtctaggagatactactataccgaatccaaataggacttagaaattccaataattggggtgttgcttctgccacaatctatgagcactcagagttgatctattgtttttgtattgttttgttttgttttgtttttttggagacaggatcttgctctgttgcccagcctggagagcagcggcatgatcttggcttactgcaacctctgccctgcctcccctgctcaagcaatcctgccacctcagcctcctgagtaggtgggactacagacatgcaccaccacgtttggctaatttttgtattttgtatttagtattttttgtaatgatggggtttcaccatgttgcccaggctgttctcaaactcctgaactcaagcgatccacctgtcttggcctcccaaagtgctgggattagtgtgagccaccatgtctggcctgattaattatttaagctagccaataggagcagcttggatgcttcatgggagagttaaattgaaactcactcaatatctttgcccagtttgtgtgatatattgagaagagccttaacctgagagacaagaaatttaggttctcctttcaactctgccattaacatgttatataaccacagacaaggcatttaactaagagtcagtttcctcttccataaaatggggataataattctatccttgtttttctctctagattgttgtaagaatcaaatgagataacgttgtaaaagcacttatttgtttattggaaaacactgtataggtgtgagtggtctattattatactaccattgcttagttgggggccagtttgtcactgaaattcactgtccattgtgtctgttgagactctctttagcttctgctctagagctttatgcttgagctccagccaacacttgggctcatttcccaggctctttaaagatcagaaaacctttaaagatcttcaaaggaggccgggcatggtggctcatgcctgtaatcccagcactttgggaggctgaggcaagagggttgcttgagcttaggagtttgagaccagcctgggcaacacagtgagacccccatctctatttcacaaaaaagaaagaaataggctgggcatggtgcctcatgcctgtaatcccagcactttgggagaccaaggcaggtggattgcttgagctcaagagttcgagaccagcctgggcaacatggcaaaactccctctctacataaaagacaaaaattagctgggcatggtggtgcacgcctgtagtcccacctacttgaaaggctgtggtgggaggattgcttgagcccaggaggcggaggttgcagtgagcacagatcacaccactgtactccagcctgggcaacagagcaagaccctgtctcaaaaagtaatagtaataaaaataaaataagaaaaataaaaagaggaaaaaaaagatcataaaaggaaatgcttgtatctgaatttgttccctggtttgaaagaactcaggtgcctaatggaaaacagaatacacaggccagagttttcaatcactggagagttttccagaatcctgaggccctttctttctagagacaccagttcccctaccacccttacctgaacaggctctggagagcctctctttccccatctgtaaaatgagaggagtagactagatcagcattttccaaagaatgcttcaggaactgctaattactggagatattagtagggggcttcttaattcataaaatgattgagtctgagaaacactacataataaattgcctttgtgtgagattcccaatgtgtattagcatagtaaaatctccaagatgtcctatattagagatacctgattaattttgtttaacataggatttcctgaatttattgaagccccaaacactttttgccagcatgctattgatatcacaagaagcagtattccatggaacacccactggggaagcactggattaaataatctctaaatttacttccagtgcaaaattctgtaactcaaaaacaagacatcctcactccatttttacattggtcactccctcaacaagaattgttaaagatattggatactcagggctgcattaggcattatggatatgggggtaaaaaggcaggagacaagtaccatataggcaattactatttaattattttatgtttatagtaaagcaaaagcaaaatacaaataaattgcattttattataagaaagtaaagtgcaaatatgccggatatgtggttacatccctttgttgcctctatatttttaaatgatatgcttatactgctatttttcatcatttttaaagaaagtattgatttcttactacgatagataagaatttagttcttatatacctctctaacttccttctctcttcttctcaatataattatagctgttttctagttaatttaaaatcagtttacataagaatagcatactgtggttatatttccttttatgtacggatttttatttactctgaagttaataattgcttactgggctgggtgcagtggcttatacctgtaatcccaacactttgggaagcagaggcgggcagatcacctgaggtcaggagttctagacaagcctggccaaaatagtgaaacctcatctctactaaaaatacaaaaaaaaaattagctgggcatggtagtgcacacctgcagtcccagctacttgggaggctgaggcagaagaatcgcgtgaacctgggaggcagaggttgcagtgagccaagatcacaccactgccctccagcctgggtgacagagcaagactctgtctcaaaaaacaataaaagtaataataataattgcttaccgtttttctttttgtactatttaagcctttatcatatatttaatattttccaatctcactatcatatgaaatcctccttttcctcccaaagttctccctcttggagctcacttctttctgttctaattcttactaatgcttttaaaaatgacatcttttctgtgattcgctccaattgatatacttcttatagaaacacattatggctttcttcttaactttatgtcatttagacagctatggtggcattaacaagccacatttgtagctagtttcttgttttggaacatacattgtgtagtcattgaaattatccacaaaggaaatggtgctcttaggaaagtactcccattatccaaaatagaaccatattaaggaataatttggccttttacttttggcttgacacattgcaaatgttcacggaatagtagtatttttagaacttgaagtgaccgttagagtccatctaggccaactctcttcaaagattggtagattaagggacaaagaagctaagtgatttgcctaagggtcatacacctgtttgaagacagaactgagactaatctccagatactctcactcctagtcaactattttttttcactcgtgacactacctcattattctagtagtccagcacttggctgtgacagataaaaagagaaattagccacattagccaaactgatttaaattaactttaaaataccagataaaatgtgttattaggtttaaatgtcccagaccctagtctcatggaatttacattctatttggaaagaccaaatagattggccgggcacaatggctcatgcctgtaatcccagcactttgggaagccaaggcaggtggatcacctgaggtcaggagttcgagaccagcctggccaacatggtgaaaccctgtctctactaaaaaatacaaaaatcagctggatgtggtggcaggtgcctgtaattgcagctacttgggaggctgaggcaggagaatggcttgaacccaggaggcagaggttgtagtgagccgagatcgtgccattgcactccaccctgggcgacaagagcgaaactccatctcaaaaacaaaataaaacaaaacaaatagatctacataaaaacagcctgggccaggcatagtggctcacgcctgtaatcccaacactttgggaggctgaggcgggcggatcaccttaggtcaggagttcaagatcagcctggccaacaagacgaaaccccatctctactaaaaatacaaaaatagccaggtgtggtggcgcactcctgtaatcccagctacttgggaggctgagacaggagaattgcttgaacccaggagacagaggttgcagtgagccgagatcaagccaatgtactccagcctgggcaacagagcaagactccatcaaaaaaaaaaaaaaaaaaaaaagcctgaaaagaattatgggccaaactgcaaagagctacttacacaaatagttcacagaaaggaaaaagccttatagggaggcaggataatataaagattaggagaatgggtgttttggtgtcagactaacccagtttgagtcctatttttgccactaattagctgtctgatcttgggcaagttacttaacctctttgagcctcagttttctcaactgttaaacgtggataaaaatagcttttatctcatggagttgtcagttttgtaagattgaataggataaaaaaaaacatgtcaaattcctggcacattgaatgcacttaaatattagccaccacaattatttatattggaacagtgagaagaccaagcatgtttagagtaaaaggtttatgcagggaacaatttattcattcaataaatgcttactaagaacttattaagtgccaggcactattctaaacaaagttcttgccctcatggaggttatagtccagcttgaggagacagacaataaacatagaaaccagtaagtatatgacaggtagtgatgagtactatagaaaaatatagagcagagtcaggggaaagggaagtgacagtgcagagtgggagctgataaggaaagaaccttttgataaatatgacatttgagcagagatctgaaggaaagtatggagtgtgccacgcagatagttggggtagggaggggaaatgttccaggtaggtggagaacaaatgtgctgctgcctggtgtgtttgaagactagctaggaagttagtgtagctaaaatgtgtgagctagggaagagagagtagtattgacaccagcaggatattagatcatgtcacatcttgaaagccaatgtagactctggccttttattcatggtaaaatgggaaaccactagacaatcttttttttttttttttgagacagagtctcgctctgttgcccaggctggaatgcagtggtacgatctcggctcactgcacccgccatcatgcctggctaatttttatatttttgtattttattttatttttttttgagatggagtctcgctctgttgcccaggctggagtgcagtggcacaatcttcgctcactgcaagctctgcctcctgggttcacaccattctcctgcctcagcttcccgagcagctggtactacaggcgcccgccaccatgcccggctaattttttgtatttttagtagagatggggtttcaccattttagccaggatggtctctatctcttgacctcgtgatccactctcctcggcctcccaaagtgctgggattacaggcgtgtgccactgcgcctggccaatttttgtatttttagtagagacaggttttcaccatgttggccaggctggtctcaaactcctgaccttgtgacccgcccgcctcggcctcccaaagtgctgggattacaggtgtgagccaccatgcccacccacaccactagacaatcttaagcacagacgtgataatgatttggcttctatttaggctctatcttttatattaagaagagactgtagaaggggaaaagtagaagcagggtaaccaattaggaggctattgtagaaatccaggtgatagattgtggtgatttagaccatagtagtagtcatgaagatggttagatgtggtcaaattctggatctattttgaatgaagaacctatggaatttgctgacttggattgggtctggggagtgaaagaggagttacggttgtcatcaacagcggatgaggtccaggtatgggagatcttgactatttttggagatctgtgaaaggattgcatgcagcggaagtcgcagcagaggttaagaggattcatctggatacatatggaaatgggaatgtgaagccagagaactgagagtttgttattcagtcctgaactaggatgctgctggtgggaatggaatggaacaatgacattttagagtgatttgataattttacagtaatttaatctgtataaagggcttagtgcttggcagaaagtgtattagctatttttttcattatggaaagaaaccagcacaggtaactaggtgtgtagatggtggagagacagggagaaagtgaaaggaaagagtcaaggattctcctagtctatataaacactgcctcttttgaaggcacacgttcatctgctccaagggctaaattttccctgcaaaatacagactttggttccaactttctcatgctgtcttccccctggtgtggcagataaatatgttagtgggggtgcatgtgtatatgtatgggaaaatgatcagtgacaaggtattgggatagtcattcagggagagagagtcagtgagggtgttagaggtagctgaaggagtggaagggagttagctagttgaaggaacactggaggactgtcggggatttgggggattaagtaaaaggtttataaggagagggtggaaagagtggttgatggctgatattctgatcatttatactagctactcagtctctactttttctagaagtccccagtaaccaaagcccaacacatttggtatcgttgattccttccattgtttgctttgctttgggttgcctaaggctgtggttatctctgagccacctaaattctcaccctcagctgaaatcactactgtctcttcatggctctcagtatatttcaatccttcttcaggaactggagcttttgagaataaggcaactttaggattgaccctaggacagaagctctgctctcaggatccttgtatgctcctgaatatgaattccatagtatgatatttggagctccccagatccttgtaggcatatgtgtgtgtgtgtatttgaggccaaaaaaaaaaaaaaaaagtccctacctccccatgtcactgaagtgaactccagaatatggacctagataatttagagtccctggacatgaatgataggacaatatactctagggctctgattttccatatcaccttgacaaatctccttgacaaaacatgggcttgcctcaccttctcaaccatccccaccttctcaaatacacacactacatctatatctttactagtttcacaacagcatatctattgattaagatatatttggtaaagaaaaacactcattttgagaaagatgacttcagaccattctcttcctctctctgggccttctctttgtgggcatgatgggaaatgaactacagatactctgcaaggtccctttcatctctaatcttccagaattctatgactgtttctgaagagaggaagcagtttttagaagttctgttgcaacctgtagtgactctgtggtgactcagtaggcgggttgaatttctgttgagatggtaagaaagagggaggattttgtttatttatttatttatttaatttattttctataatgatgttgacaccataaagcaagaattttagaaggtttggaatgaaggggctgaggaaggagtctgttcctcttgcctgagggttgtttgtggctggtagcataaatactcaaagctaatgggagatacatgggaaatacctgttgttgggaacagtctttctccacttgaatgaggtgagcagattgtggaggtgagctggaggatttcatgtttaaggtggatttctaacctgcttctctcatttctccctgagttttatgacccttgacactttacagaacacctccctaaagtggtgaaaatgagacaagtaggctgtactttccgagtcactttttttggaagtaggtggcatatgaataataaatgtattgctctgaagactctgtcttgaggcctgtttcagtgtcctgagcttcatatcagctacctgagtttgtgtctgggccaacttcttatactggcatgttcagtaaacatttaatgaaaagaatggctttagttaatgcccttttctaagccttctttttcccacttataaactgttagggatgtacaagactcttttttaagttacttctggcactgaccttcagaatttctgtcacaaatgcagggaactgcctggataaattctctacatttctgggagaagttaggggagaggaggaactggcctcctctcctttgaagatactaggtggtcagatgggagcaggggttcttgccttatggcagccccacatttataacaattaactcagaaggcgtggagttgaggatgggccttcccccacttcctggatttggtttgggagaggttgggcactggtaatgatccccggtgtctcacatcttgaacctctgagaattcaagactctcagtttcagtccttagaggtcatttggtccaattcccacacaaatcaggaattgtagtaccaatatcccaatccctaacaatccccataagttatcattctgattctgggtcattctcattcaattcctacatctctaccttaatacttactagttgggcaagttacctcacctctttaaacctcaattttcatgtctgtaaaatggaaataataagtcctgtgacatagattgttgtaaggaagaattggaataatctatataaagggcttagtgcttggcaaaaagtgtattagctatttttattattatgccaaaaccctatacctaaaacaggtaacagcggtgctgatctggttggagcatggatgggaggcctagagccacattctgtaggcttctccaccctgttactgtgttccctgtgaggtgtgtgtctggaatccctagggatttgcaaagctcagtttgaaaacccctgatctagtccagtgttcttgttttataaatgaagtgatactgagtccacagtctcaggttcctcatatgatgtggcttcctaaacaaccatgtcggtctcccctggatatactttagttggccaatatctctcattaagtattccagctatggtctgacttgaacagggtactattaccattctttcactttacatatctaagattatattagcctcattgacagccacactctccagtcagtttataatctctcataatacttaagattttccttttctttctctctttctctctccttttcctttttcctctttctcctttcatttccttccctttccttcccttgtttgtctcactctgttgctcaggctggagtgcagtggtgcagttgtggcccactgtagcctcaaactccaaggtccaagtgatcctcccacctcagcctcctgagtagctaggagcacagtcatgcaccaacacaatcagcgaattttatttttatttttattttgagacagaattttgctcttgttgcccaggctggagtgcaatggtgtgatcttggctcgctgtaacctctgcctcctgggttcaagcaattctcctgcttcagcctcctgagtagctgggattacaggcacacaccaccatgcccagctaatttttttttttttttttttgtatttttagtggagacgtggttttgccatgttggccaggctggtctcaacttcctgacctcaggtgagcttcctgcctcagcctcccaaagtgctgggatcacagacgtgagccgttgtgcctggccagcttggaattttgaattagagaaggtacaagagaagactgcaaaatctcagatataggagggccttggactacctattatctctttttgggatataaagtttttagaacagccctcttctagggttctaaggtctggtctacttatggttttactatcatggtttattatcatggttaccttatggttttaccatcttggagcatcattattttatttaaataaaataaatacaaccctgaaactattcaccctggaatactttacacacagagttgcccgtacagaaaacatctctagagcatatgaacacctgcatttctaagtgtgatttttttgaccagagactaatttttgaaaccaacgtttgcttctttttgaccatgatattttaatacatgaaaatctatccaaaggagcagtcacagagggttcttgttgaactttagtttctgagctgcttttgaggatggttacttgaggtgtcctccaaactgccacatatagtgagttagagaatctgccaggcacagtggctcatgcctgtaatcccagaactttgggagactgaggagggaggatcactgaactcaggagtttgagatcagcctgggcaacacaggtagaccccatctctataaaaaattttaaaattaggccaggcgtggtggctcacacctgtaatcccagctactcgggtggctgaggcaggaaaatcgattgaacctgggaggcagaggttgaagtgagccaagatcatgccactgcactccggcctgggtgacagagtgagactctgtctcaaaaaataataataataaataaaaaattagctgggtatggtcatgcatgcctgtggtcccagatatttgggaggctgaggtgggaggatttcttgagcctgggaggttgaggctgcagtgagcggtgatcgtgctactgcactccagcctgggtgagaccctgtctcaaaaaagaagttagggagtcctaatacaacatctggatttgttaaaaatctgtctagttgttttcatatgatgggaaacaaactgacagaaatctaattttatttatatggatagccatgctgtacttgctaagaccacaagaataggctcagagagaggggaaagtttgtgtaaattatacattgaattaggggtaaacaatctagtctgatgactccatattcagagccagggtttcccaattttagtttatgtaaataattacctgaggatgtcgttagaaatccagatttctggaccctatcccagactattgagttagaatctccagaggataagacctctgacttgtatttttgtaacctcctcagacaattctgatgttggggggagggacaaagtaccattgaaaaattatttagattaataaccttaaactcttaaaattatatacctaaaagaattttgaaaaattatgtaactcttgacataatgttcatatctaaaaattttatcataagatttaaaaattgcaaaaaatcgaatttccaaaacattttacatattatatacacacatatatatatatgcacatataggttatacctctttcaaaacattggcactgcaaatttagctcatataatttatagaagacatctaccatacaacctgttttgcatagccagttatcacccaacataatcagccaaatcagatctactgtgttagaaattgcctaacttctttcttaagataaatatgttaatatatgactctgtgataactgtttcacttctgagttgtaattctaagagatataaggcaagtagtcttgccatgagtttgttacgtggatgaattaagatgccaattctttcaatactgatttctcagagaagctctcattgatttgctttcttggggctctccctcagaagttatacattctcaaattgtccctttgtttaacactttgttcataccctgtcattgtaccataataaagtttgagataagagagagctatgacattcttgtttaacgtgggagaagggtaattgtaaaagagagtgagaaagaagaaccaactcagacagatcattgttaggaaatattacatatggaagttgaggatctagacatttattctcttcatatttttctgtgcaggtactcacaggaatagagtaccgtagattgaggactaatgatttaaactgcctttgacctagataatagagaaccattgtaatgaatatttttgcatgtgtctattatacttgagagacttgatgtacacataaaatgatgcccctggattttctttccactttctgtttctgctctaggcatattcctcttttgggctgcattccaaatgctctgccctcattcacttgttataggtaaggccagcatgggacacaggatggtaggaacaagtgtgtgattcccctcctgtaagtaggcatgtaggcagtgagaaaagagaagaggtacacaatccatcgggcaccaaagccactttggccaaggggaacatgcaaaaggtatttggatcaaggcctgaaaatagctggcaagaggacagggtacaataatagcccagactgcagggcaggagtcccatactctgaacctcagctccagggttctcttccagcctcttcacagagtcccagactgagcccactgtaggatctcaagaaacacttcttgacatgattccaaaatccattccacaaattccactcttgtctttcctctgcctgtccagcatctatcttgtttatctgtatcctatcttatcccctctccttccatactttctctctttgatcatcttggatccagctggtcatataagcagagataagtttgttcatttatttattcattcttttatctattcattttacaattatgtattaagtgctcactgtgtattggcctttgtggtaagcactaaggagaaaacatataaaaagatatcctgtctgccattaaggaactcataatccagtgagggaaacagatgtctacataggactctagtgctagaaaaaaataagtgcccaagtgttgtctttagaaataaacaggctgggcgtggtggctcacgcctgcaatcctagcactttgggaggccaaggcgggcggatcacttgaggtcaagagcctggccaacatggtgaaaccctgtctctactaaaaatataaaaattagcctgtggtggcgggggcctgtagtcccagctactcgggaggctgagacataagaattgcttgaacccgggaggcggaggttgcagtgagccgagatagcaccactgcactccagcctgggcaacagagctagactgtctcaaaaaaaggaaaaaaaaaaatagaaagaggcaagaatgaatgaatgaatagtgcttaatctttctaatgaatgaatagttacaacctttctggaaaggaaggtttgtaaagatgtctgtattttccaaattaatctgtacatttattgcaattccaatcaaaattgcaattatattttttattgagatataatttataccatataattcacccatttaaagtatacaattcatatttttaatatatttgcaaaggtgtacaactttcaattttagaaaattttcatcacccccaaaagaagtgcaatactcattagcagtcatttttcattttcccccaacttcttctcctccagctctaggcaaccactaatctactttctgtctctaaggctctgccttattctggatgtttcatataaatggaatcatataacacgtggccctttgtgtctggtttctttcactaagcataatgttttcaaggttcatccatgttataggccggatgcagtggctcatgtctgtaatcccagcactttgggaggctgaggtgggtggatcacctgaggttggtggatcacctgagcttggcagtttgagaccagcctggccaacatggtgaaaccccatctctactaaaaatataaaaattagccggccatggtggtgcatgcttgtaattccaggtacttgggaggctgaggcaggagaattgcttgaacccaggagacggaggttgcagtgagccaagatcatgccaccacactccagcctgggcaacaaagtgagactgtcttaaaaaaaaaaaagttcatccatgttataccatatatcagtacttcatccttttacattgctgaataatgttgcattgtataactgtatcacattgtgtccggaattggtgggttcttggtctcactgacttcaagaatgaagccgtggaccctcacggtgagtgttacagctcttaaggtggcacgtctggagtttgttccttctgatgttcggatgtgttcggagtttcttccttctggtgggtttgtggtctcgctggctcaggagtgaacctgcagaccttcacagtgagtgttacagctcataaaagcagtgtggacccaaagagtgagcagcagcaagatttattgcaaagagcaaaagaacaaagcttccacagtgtggaaggggacctgagcgggttaccactgctggctggggcagcctgcttttattctcttatctggccccacccacatcctgctgattggtagagccaagtggtctgttttgacagggtgccgattggtgcgtttacaatccctgagctagacacaaaggttctccacatctccaccagattagctagatacagagtgccaacacaaaggttctccaagtccccaccagagtagctagatacagagtgtcaattggtgcattcacaaaccctgagctagacacagggtgctgattggtgtgttcacaaaccttgagctagatacagagtgccgattggtgtatttacaatccctgagctagacataaaggttctccaaggccccaccagagtagctagatacagagtgtccattggtgcattcacaaaccctgagctagacagagggtgcagattggtgtatttacaatcccttagctagacttagaggttctccacttccccaccagactcaggagcccagctggcttcacccagtggatcccgcactggggctgcaggtggagctgcctgccagtcctgcgccgtgtgcctgcactcctcagcccttgggtggccgatgggactgggtgccgtgagcagggggcggtgctcgtcgggggggctcgggccgcacaggagcccacggtgggggtgggggaggctcaggcatggcgggctgcaggtcccgagccctgccccgcgggaaggcagctaaggcctggcgagaaatggagcgcagtgctggtgggctggcactgctggggtacccagtacaccctccgcagctgctggcccgggtgctaagcccctcattgcctggggccggcagggccggccggctgctccgagtgcggggcctgccaagcccacgcccactcggaactccagctggcccgcaagctccgtgcgcagccccggttcccgctcgggcctctccctccgcacctccctgcaagctgagggagccagctccggccttggccagcccagaaaggggctcccacagtgcagcggtgggctgaagggctcctcaagtgccgccaaagtgggagcccaggcagaggaggcgccgagagcgagcaagggctgtgaggactgccagcacgctgtcacctctcaacgttatcacatttttttctttctttctttctttccttctttctttctttctttctttccttccttccttccttccttccttccttccttccttccttcctttctttttctttcttttctttcttttttgtttttttttgagatggagtcttgctcttgtcgcccaggctggagtgcaatggcatgatctcggctcactgcaacctccgcctcccgggttcaagcgattctcccacctcagcctcccgagcagctgaggtacaggcactggccaccacgcccggctaatttttgtatttttagtagagacggggtttcaccatgttggccaggctggtcttgaacacctgaccttgtgatccacccgccccagcctcccaaagtgctgggattacaggcatgagtcaccacacctggccccacatttttctttattcattcctcaattggtggacatttgggttgtttacactttctgatgtcatgaataacgctactacaaacctttgggtacatgtttttgtgtagatgtatgttttcaattctcttgggtatatagctaggagtttaattgctgagtcatatggtaagtctatatttaacctattgaggaactgccagactgttttccaaagtagctgaaccattttatattcccggcaatgtatgaggtttccaatttctgcacatgcttgtcagcacttgttactgtctgtttgtttgattatggccatcttagtgagtgtgaagtgggatctgattgttattttgatttgtatctccttgaccatgcctgaccttttttttttttttttttttttgagactgagtctcgctctgtcgcccaggctggagtgcagtggcacaattttggctgattacgacctctgcctcccaggttcaagagattctcatgtgcagcctcccaagtagctgcgactacaggtgcgtgccaccatgcccggctaaatttttttttttttttttagtagagatggggtttggccatgttggccaggctggtgtcgaacttctgacctcaggtgatcctcccaccttggcctcccaaaatgttgggattacaggcatgtgctactgcacctggcccattaactgccttttgaagactggccggtacagtcctggctccctcaataggtgaggaatcaatgtttagggagaaatttcataaatagtccactgattgaggctatttactctagtttcatcagttttgagttggtgaaaagcccgtccaaatttgggtgataggatgacagttgattccagtttttgaatcaggagctgagtgaggctgcattagggtctacaagttagatatcatttgaaaccagaaatctgtggtgttttcaaaaggaactttttctaaggaactaagggaaaaccaaacagaatgatgaatttctgttaagtacactaaaattccatccttggtagttgtcaacctcacagttctcagagttcctacatttttatttttttccttatgctaattctgaatttggaaacaataccccccttttggaggccatgtcatttaggaggagaaggccctgaactagacatttagactcaagaactgtgctatccaacatggaagccactagctacatgtaactattgatatttatagtaattaaaattaagtaaaataaataatccagttcttccgccacatttctagtgtttgatagctatatgtggctagtgactaccattttggacaacagtgctttagaatagtgttgctactaatttgtaagtaaccttgaggtcatcactttctatttctgtgccataggtttctcaatggtaaataagagtggtgagtctcaaaagtaccatcctcttctggaattctttctttttctcttttcttttctttctttttttgacaggatcttgctttgttgtccagtctagtctctaactcctagcttcaagtgatcctcccacctcggcccctaaagtgttgggattacaggcatgagccaccatatctggccctcctctggcattctgagtaatctgtggttcagtttttggggtgtgcctccatctacctcctccttcagcccttcttgatacttactgcagctagggcagaagcacccagagggaacattaggctgctaattagtcaaggtacattgctcccattccctggtgaaagggaaattgacttgtgggtatacttatatcttgagtgctccacaattgtgcagtgctttatggatcacagaactctttcacattgttttttcattttatagaatcaaagaatctcaaagttggaagggctgtaaaggtcatctcaaacttcaataaccatgaattatatggggagcttatgcaatgaaaatttcaaggccccactccctggagaataatctagtagaagtaggtgtcagggttaccctggcccaacctgaacaatcctgtgctgcatgggaacttggtactgcattattaacactatctgaccactctttgagaaacactggtcttgcttggtccccagccatattgtggaggctgctctttggtatcgctacaaatcccagattcaacatgatatctccagggtcaggaaactcctgaaggagtgccttccatctttggacatctctaacagaaaggttttttttttaatatggagctctcccaattgatgtagattttccatttatagttatactacattagtctacttttccccataatgatcctttagattcatgcattcattcagcaaaaatttactgaacacctattatatacaaggttctgtacgagacaatgagggattcagcagtgaacaagaccaacttggcctctgccttcagaaactgtcttctgtctagtagggaagataggaaattagcaaaaataataataagtaaacaagtaatattaattctattaataatattaacaataacaataagtaaacaaataacaaaagaagtatagtttgagaaaaatgctgtgaagaaaataagcagtgttatgatgaataacaagaagagctgatctacttagggtggtcagggaaagcttcactaggaagtgacatttaagctgagatttgaaacacaagaagagttggggaaagatagttaaagaatatggcatgttctatcagtcagaaggccagcatgtttggagcctagtaggcagaataggagaatggcacaagatgaagttggggaggatacaaggcatagcaggagtgcggattttcttctatatgcagtggaagctgttaaagggttttaagcaggaggtgatatgatctgatttgtggtttgttttattgttgtttaattaattaattaattaattaattaattttgagacaaggtctggctctattgccctggctggagtgcagtggcaacatctcagctcactgtaatctccacctcctgggctcaagtgatcctcccacctcagcctcctgagtagctgaaactataggcatgtgccaccacacctggctatttttttttttttttttttttagtagagagagcatttcgctatgttgcccagtctggtctcgaactcttgggctcaagcaatcctcccaccttggcttcccaaaatgctgggattacaggcatgagccaccatgcctggccaatttatgtttttaatagatcattctgtggccgggtgcagtggctcatgcttgtaatcccagcactttgggagccaaggcaggcaaatcacttgaggtcaggagttcgagaccagactggctaacatggtaaaacttcatctctactaaaaatacaaaaattagccaggcatggtggcatgcacctgtggtcccagctacttgggaggctgaggcaggagaatcatttgaacccggcaggcagaggttgcagtaagtcaagatcacaccactgcattccagcctgggtgacagactgagactctctcaaaaaaaaaaaaaaaaaagatcacagatcatgctgggtgatgtgtggactggaagggaacaagagtgaagtgggaaaccagttaggtgggcattgtggtcatccaggcaagagatgaaggtagcttgaccggggtggagacaatgaagatacagatttttgagacttgctatcacatctctcaatatcttctcttccacaaaataaacagttcagtgttcctctcatctcctctcataacaggtttggtgtctcttctcacctgggtgtttctcctcctgtttctcctccatctgattcctctgtaaagaactcagtctttccctcagctgtttcttcctatcctgtgccttgcttgtagttctagggaattaaaatcttcaattcaatgactatcgttctcatataaagaggggagctgggtgcagtggtgcatgcctgtagtcccaactactctggaggctgaggtgggagaatcatttgagcccgagagtttaagaccagcctgggcaacatagtgagacattgtctcaaaaaaaaaaaaaaaaaaaaaagttggggggtagcaccagtcttccctgtcattagtcaattaccagtctttcaattattcaaccatgaccctcgaatacctattgtgccaattgtgcttggaggagacagagaagaagacatgatctctgccctccaagagctcagggtataatgggaaagataaggcccaaataaatataataaaagctagaaaaacagatcacaaagaaagtgagataaagggctttgggaggaagaaagaacttttagcttttgggtaggtgagaaaaagagaaactaacaaaaatttcatggaaaatgttaattcagagaacctggggctggagaggagcgcagggagtatttttttttttttaatgtggtgatcaaagataaccttactgagaagccaacatttgagcaacgactcaaagatagggaataagtcatgtggctatctagggaaagaacattccaagtagagggcaaaggctctgaggttaaatgttcttggtgcttttgccaaacactggggaggccgtttggctggagcagagggaaagggagaggaagagagaatagttgtatgtgaggacagagaggaaatgagggactagatcatgtaggccattgtgaggactttgacttttactcaaaatgaaatgggaagtgatctgagcattctgagcagaagggtgacataatctgaactacctaatggtagttttggactaggatggtagaaatagatgtgaagagaggtagtctaattctaaatggattttgaatcaataatgggttaaagtaaatttcgagagtgtgagaatgaagtagttggagaagactccttggaggaggttccctaggggaagaagatgagaaggactagtgactgtgtaccatgggttgtcacaccaaccatatggcctccaggtgaaggaaaagtagtttggtttataccaagggttccccatgttatcccaccagctaaatttctcattaatagttttgtttgattcacagtgtttaaaccttttttttttttttttttttttggtaggcaggggcgagacagggtctctgttgctaggctagagtatagtagcatcaacgtggctcactgcagccttgacctcccgggcttatgtgatcctcctattttagcctctcgagtagctgggaccataggcattagctaccatgcttggctaattataaaattttttgtagagacaagttctcaccatgttgcccaggccagtcttgaactcctgtcctcaaacagtcctcctgctttgccctcccagagtgctggtattatggcatgaaccactgcaactggccttaaagctttaaaaaaattagtggtcaacacatataaattcagaagttttttttttttttttgagacggagtctcgctcggtcgcccaggctggagtgcagagtgcagtgcagtagtgtgatcttggctcactgcaagctccacctcctgggttcacgccatcctcctgcctcagcctcccgagtagctgggactacaggcgcccgccaccacccccggctaattttttgtatttttagtagagatggggtttcaccgtcctctcgatctcctgacctcatgatccgcccgcctcagcctcccagagtgctgggattacaggcgtgagccaccgtgcctggccaattcaaaagttttgacaaaaatagattccaggctgctattgaaaaatcgaaaaaattgacaacattgagccctgattcctagcaagcaaaagctgacaggaaccaagtttaggtactagatgcctccttttgccagagcatgcatttgccagttttcctgtccttccccttccctattgttcccctgaaactgaggctaaggtttattatacatgtgctgctgttttcttatagggaagtggaaagggaactatttcttatctttatcatatattttctttcatgtggtccacttatttacattccgtgcctagatcctgccaatttttgagcttgcagctcctggtgtagaggaaagaggcctggaccttaagtcgtggtccctgctctgctgtggtaacccaccctgtgatgccaagcatagctaatagcctctttggatctcagagttaagagactaaattggatgttcttttaagagttctgatatcctggccgggcgcggtggctcacacctgtaatcccagcactttgggaggccgaggcgggtggatcacaaggtcaagagattgagaccatcctggctaacacggtgaaaccccgtctctactaaatatacaaaaaattagctgagcgtggtggcaggcgcctgtggtcccagctactcgggaggctgaggcaggagaatggcgtgaacctaggaagcacagcttgcagtgagccgagactgcggcactgcactccagcctgggtaacagagcaagactccgtctcaaaaaaaaaaaaaaaaaagagttctgatatcctagagggcttgggattttgcagtaggccaataccctgcccctcacctttcccaaccagccaggggccccagcctggtgtgtatgtcagagaaagaagacactggaatgagtaaggtgcttatatcaataatgtataacttgagcccatagccaaggagaggaatgcacactgtggtgtgtgtgtgtgtgtgtgtttcacggttggaagtgggctcaaataagttgtacttgcataggttgtgcttatttcttcttgtgcactctctatgtactaggctgtacttgaggtgctagggatgtagcagtgaagaaaacaaataagatctctgctgtcagctgggtgcagtggctcacgcctgtaatcccagcactttgggaggccgaggcaggcggatcacctgaggtcaggggtgtgagaccagcctggccaacatcttgaaaccccgtctctactaaaaatacaaaaattagccaggtgtgatggtgggtgcctgtaatcccaactacctgggaggctgaggcagggagaattgcttgaaccctggaggcggaggttgcagtgagccgagatcgcactattgcactccagcctgggtgacagagcgagactccatctcaaaaaaaaaaaaaaaaaaaaagatctctgctatcatggagcttatattccagtgaagaaaacagataatatataagtaattaacatacatgagataatttcaaataatggaacgtttcatgaaaaaaataaaacagaatgtgttttttttttttgagacagtcttgccctgtcacccagggtggagtgcaatggcgcaatctcagctcactgcaacctccatctcctgggctcaggtgatcctcccaccacagcctcctgagtagctgggtttacaggcatgcgccaccatgcccggctaatttttgtctttttagtagagttggggcttcgccatgttggccaggccggtctcaaactcctggcctcaagtgatctacccacctcagcctcccaaagtgtgggattacatgtgtggcacctggcaaaacagaatgatttgatagagagtttctgaaggggcacactgtgcacataggtggctacatgtatatggtggttgtacttgcagatacagataagtccatgtttgaatcctgggtgcatatatttatccttgtttgtgcctatgtgtgcagatgggcagcttttatgcctagaatgtttgtatatttatatgtgattttatacaagtgagcgcacataggtgagttggtatgtggtttgcatatggggacacatgtgcttgggtatgtatatgttggcattcagccataaccggagacgttctgaagttcctgtggcacttgtcagtgagccagttaaggaaatggcttttctgcctctggcattcagggccgtttgccagcttcctctctccctgttctttcccactttagtaagctccctgtgtttggcttctctcatccctaggagggttaaagcctactgactcatcgagccaggaactggaaaaaggctgataatcttctgtgtgacctctgttagtaagaaaaggcctggcttccctgccagtccctgtccttcacactatgagggagagtcctgacttgaaatcagaagacctgagcatctattcttggctctgccacttattattgtgtgaccaataatctctctaggtttcagttacctccttcataagtgctctgtgcagtaaggaaggagaggggaagcaatggtctgtggtgctaagggagagccagatggtgctggtgtctgaaggaggagggagaatattctgagcaggggcaatgatgtggccaaaagcgtggaggtggacctgaacttgccaagggaaaccagggatccacttacagtaaaattcaaacttcttactattgcctacaaggctctacgtgatttggctgctgcctacctctcattcttacccaacttcttgctcactgaaatctagccatactgtctttctttctttctttgaaaaggtctcagtgccttttcacttgatgctccttttccccagaatactcttcccaagaattagtatgattgcctacctctcattattcaggtcttggctcaaatatcacctctccagagagaggccttccaggaccatcttatttaaagtagttgttccctaatatttatcaatatttaaaatgcacacatcagccaggcacggtggctcacgcctgtaatcccagtactttgggaggccagggcaggtggatcacctgacgtcaggagttcaagaccaacctgaccaacatggtgaaaccccatctctactaaaatgcaaaaattagccaggtgtggtggtgcacgcctgtaatcccagctactcaggagtctgaggcagaagaattgcctgaacccaggaggcggaggttgcagtgagccaagatcgcgccattttactccagcctgggcaacaggagcaaaactccatcttgggaaaaaaaaaaaaaaaaagcacacatctcttgaaccaacaggtccacttctggtaattcatcctacagatatacttgcaggtgagtaaagtgacataaaaataaaaatattcattgaagcatttatttgttaaataaattacagtacatacaaatagtggaatattttgcagctgagaaagataatgaaatagctctttaagcttggcaccgtggctcacacctgtaatcccaacactttggaaggaaggctgaggcaggaggattggaggatcacttgaggccaggagttccagactagcctgagcaacatagtaggatcctgtctttgcaaaaaaaaaaaaaaaaaaaaaaaggtagccagacatggtgactctggcctgtagtcccaactgctcaagaggcagaggtgggaggatcacttgagtctgggaggttgaggctgtagtgagctgtgatggtgccactgcaccccagcctgagtgacagagtgagaccctgtctcaaaaacaacaacaacaacaaataaaaaagagaaatagttctttaagtcttggtgaagaatgatatcaaggtatattgttaaatttgaaaaatcaagatgatcaatttctacacataagatttgtgcattttattgaatgcatataataattaacaaaagatacagaatagtgtgtattgtatgccatcatttgtgtagaaaaaatgagactatgtaaacaaatgcatgtagtatatatgcttgtctgacagacctgtcccttaagtagagcagttcttcctacccctgttaccctgtgcttgactggggactatgaggtgttcatctcttttctgaacaacattaaaatccttttttttttttttttgagacaaagtcttactctgtttcccaggctggagtgcagtggtgtgatcgccgctcgctgtagccttcaccttctgggttcaaatgatcctcccgccttagcctcccaagtagctgggactacaggcgtgcaccaccatgcccggctaatttttgtatttttagtagagatggggttttgccatgttggccaggctggtctcaaactcctgaccccaggtgatctgcctgccttggcctcccaaagtgctgggaatacaggtgtgagcctctgtgcctggccaaattttttttttttttttttttaaacagagtttcactcttgtcgcctaggctggagtgcgatggcacggtctcagcttgctgcaacctccatttcccggattcaagcgattctcctgcttcagcctcctgtaaaattcagttttttaacattcaattttcaaattttggtcttcaatgatatctcaagggtcttattaaagatcataatgatacagacttcttgcaaagtaattattttggtcattccacactagttgaattaccctagccctgtgtcctacaaagaatggtcctgtctgaatattgattgtttctggaaagtcacacagaatattggtaactgttttgccctgggcatggtggctcacgcctgtaatcccagcactttgagaggctgaagcagttttgcttgaggccaggagtttggagaccaccctggacaatatatcgagactctgcctctatgaaaaattttaaaataaaaaaattagccaggtgtggtagcatgtgcccgtagtcccagctactcaggaggctgaagtaagaggattgcttgagcccaggagttggaggctgcagtgagctatgattgtgcctctgtactccagcctatcaatagagtgagaccctgtctctaaaaaacaaatcacaaaacccaaactgtggtttgccagtaggcagggtgattgggagataggagtggggagaacacttctcattatgtatctttttatgtagtcccacttgtatgtattacttattcaaaaaaatcataaaattggaaaaaaaccactaagggaaacatttatttatttattttttgagacagggactcactctgttgtccaggctggagttcagtgacatgattacagctcactgcaggcttgacctccagggtacaagcgatcttcctgcctcaacctcctgagtagctgagactacaggtgtgcaccaccatgctcagctaattgaaaacgatttttttttttttagcaatgaggttttgctgtgttgctcagattggtcttgaactcctggtctcaggtgatcctcctgccttggcctcccaaagtgttgggattacaggcatgagccaagagatcttcccatctcatctttctgagtggctgggactataggtgcatgacaccacactcagctaaaattttttttttttttttttgagacagagtttcattcttgttgcccaggctggagtacagtggcacaatcttggcccactgcaacttccgcctcccagattcaagtgattctcctgcctcagcctcccgagtagctggcattacaagcatgcactaccacacccagctgatttttgtatttttagtagagacggggtttctccatgttggtcaggctggtcttgagctcctgacctcacgtgatccacctgcctcggcctcccaaagtgctgggattacaggtatgagccaccgtgcccagccggatccagctcaatgtttttagagatgcggtcttgctatgttgccaggctggtcttgaactcttggcctcaatagatgggcccactttggcctcctaaagtgttagaattacaggtgtgagccaccgtgcctgacccaagatagtatattttttaaaagtatttctccctagtcactcatttttatatcattctgctctatttataatgcttatcataatctgaaattatcctggttatatttgttatttgtttattacccacactatcattggaatataagctccatgatatcaggtatcttacttatgttgttcattggtgccttatttcttcttttttttgtttgtttgagacggagtcttactctgtcgcccaggctggagtgcagtggcgtgatcttggctcaccacaacctccacctcccttcaagctattctcctgcctcagcctcccaagtagctgggattacaggcgtgtgccaccacacccagctaatttttgtatttttagtagaggcatggtttcaccacattggccaggctggtctcaaactcctgacttcaggtcatctacctgcctcagtctcctagtgtgttgggattacaggaaagagccaccacgccccgcccattggtgccttatttctatacatgtagatagcacatagtagttgttgaataagcaaatgaatgcatgaaggaatgactgaagtaaaccaggctaaagcctaggaaggagtgggaggcaaggctgaggaggtagacagaaatcacctgataaaggatggcgattctcaaactttatttatttattcaagatggaaactcactctgtcatccagactggagtgcagtagtgtgatctcagctcactgcaacctctgcctcctgggttcaagggattctcgtgcctcagcctccccagtagctgggattacaggcacacaccaccacacccagctaatttttgtatttttagtagagacgcggtttcaccatgttggccaggctggtctcaaactcctgacctttgatctgtccaccttggccttccaaagtgctgggattacaggcgtgagccaccgcgcctggccaattctcaagaatcccctactaattccttgtaccatcttgtaataaagaagcagatccttggaccctgtgattctaattcagtatgtttgagctggggcccaggaatctacaaatcctctagatgatttaggcacaagtgatctggagaccctactctgaataatgcagtcttgatgcctcatcagaaggaatcacatctgtgatttcacttctccttaatacattactaggatggaagagaaggggccgtcactccatttcatcaaggatcagagatggacagtgcattttctaatgacatacaacatgtgtataaaatatcttgaatggccaaagtatctgacccgtcagctcaagattggtgatggcaagattgatggtgggcagatagctcatcctcatagaacagttccaggccttagtgtcactgaatggattttatgactctgcctgtttcttgtttggggaagaagttatacccctaatcactggttctttctggtatgtctcagggagggcaatgagccaggggagaccactcagatcacataccatcagcttctggtccaagtgtgtcagttcagcaatgttctccgaaaacagggtgagtgtgggggtgtgggaaaggactgggggtctggccttggggtatctgagtatctgagacttatggggagagggcaagggatggaaagaatttggtaacagaggaagagaacaggtcagctgggagggaggccagctggatgggagggagcaagtagcagcaagaagggttcatggttcatattctgtgcttttacctgcaggcattcagaagggggaccgagtggccatctacatgcctatgatcccagagcttgtggtggccatgctggcatgtgcccgcattggggctttgcactccattgtggtaggagtttgggctggtgaaaaggggcaggcgggggggtggggctctggagaagtaggttgggcctagatgatggagggtcttaaataacaaactaaggagcttagaaggtttgtgtcataggtccatattagttattcagtttcttctaggaccctggcttagagatcctgaaagttccatgagcaacccctttcttcattcactcaatccctggggctttcttctctccctcagactttcttcccttccctagtttgcaggcttctcttcagagtctctatgtgaacggatcttggattccagctgcagtcttctcatcactacaggtgactaattctctcacctcttctccagaaccccccatacctcaagccttggtctccaatcagctcattggtatttggggctactcagcatagagggtagagactgcctgccttttctctcctggtcccacctcagctgaccctctgtcagctcgaatcagctggaagagccagagttaagaggcctactcaggaagggccctatggacattgtgcccactaggcagcatggggcttactaaggcctggaatgtctgttgctccccaaagatgccttctacaggggggaaaagcttgtgaacctgaaggagctggctgacgaggccctgcagaagtgtcaggagaagtaagtgtgtttggctactgtctgagttgactgagcctttccccagtgccaggttccctttgtcccctctaccctaaatggacatgggtgggtcttgccaagttccctttgagccaacaaggctaccactttaggcttttctcttctccaggggtttcccagtaagatgctgcattgtggtcaagcacctggggcgggcagagctcggcatgggtgactccaccagccagtcccccccaattaagaggtcatgcccagatgtgcaggtgagtctggcactgctatgcctttctccaggctcaaattccttcacttttcctgcctagaaaattcttgatgtccttctttgcctgctcatcagtatactgaggatccaggagcaattctaggaatgcctcctctagcagggctaggtgggaactggaagactttgaccttgactgtgggtagagaggcccttgtaccttgagaacatagcacaagcgattgtaagggagactcctatgctggttggggtatccttgtgggcacaggggatcctcagggcctaggcttgtgttagaaatgtctaacttgagtgacaatatatagtcatctccattactaggctgtgatgtggggtgggctatctttgtggcctaagggatgcccaccttggaaggaccagagtccagccctcacaatatggcctttgttagctttggacccccaggcttctggtgggaatggtagaaatgcccagtgatggcctccaggctgagcagcatgagggatcaaagttctggggttgagtaagagtctgtgacttgaggctccctgaggggtcttagggctagagaggctgtagtctagtttagggaagttggaaagcccaatcagtgttaggggttttacatatataggggctggaatcaggatcaggaaaatggaagctgggaggaccagtgagaagggagtttggggtttatgacacactgaccctttcctcccactccctgtatacttggaccctcctcactacccttttcatcctgggctcttaacagggtaaactgaaagagaaatccaagcgtgttcagccccaggtatccatttctgcactgccgtgggcaccgcttctctgtttgcttgtctgtgtgctcatctgccctttgcctgtttgccccattgaggtggctgccagacctaacctccttccccttgcccctgggcaacttgacatctaagccactgaagggtggtgaaattaaatgtccgttactgcctctgtgaattggtatagagtatggatcttagagaggtaacagcagaacacattttatcctgatactcaggacctttgtgggagaggggacaaggtaacctgtcagaaaacatttactgtgcaggtagctggagcagagccgagagacaggaggaggaggaggtggaggaggttcagaccctgactttgggaattcactgtcaagttggggagttagacatgtattattaatacaaaggaaaatctaagttttatacaggacagcagaggagattcctaaatacatttatatagtgctttgggatttataaactgcatataactttgtaatatgattaagtgctaaactgaacaaaagtcatattgtaggtggttctaagaagggagatccataagggggtgctcaaagcagattagtatcgaggaaagagtgggcctgaagtccagagaccaatttttagctgtatgaccttgagtaagtcaattctcccctctgggattcagtttccttatcagtaatggagagatgataacacatgttataaaaggaaacagcttcccttcctaaaacaacacataaagctcactattcctctggattttaccatcttcacagggtgtcttactctaaatctgctatgattaacctcttaggccaatggtagatataagccccttttctctattctcattagcatggcggagacagatctgattcctagggcatactgctttccttttaaaactcaggcaggacctacaccctttcttttgaaagaggtgacaaacttagtggcttaaattgtaatctctggagccagattacttgggttcaaatcctggctctgccatctgctgctgtgtaaacttgaacaaattacttaagctctctcgcttgtttctccatctgtaagataaggataataattatacctatgttatcgggttttgtcaatatatgtaaggtgtttggcacatagtaactactcaataaatgttagctgttttttccttccccttaatgcaacagacagattggcatttctaaaacagagaccagaaaagaaataacaaactcttgtaattcttaataccagagaccttcaggccaaaggctactggatttttgtttcttggaggtgaaaataaccagtttccaaaataccaaagagcataaaaataggcttaaaaagtccaggttgttggtctgagaattgcagtcaaagctgcaaaaatctttctgacaatgggccccatatttaaaaattaaaaaatagttttcaaaagagctgcaaaaatcctggcagggctccaaacccctttatccttaaacaatcttccagggagatcctggcagggtttgcagggaccctcctcaaccatatcgtctatgagctccctcatattcctctcccgtacatggcagctgccctccttgagactatcctggtccaaggacaaaggccaactcctcaattcttattttagaaaattcagaccttttcctggtgcagagcctggggcctcataggcacacacctaattcacaatcaaaggttgctttgctaattgagttcactctgcttcctggtgctagttatcagttccacacctggagtactctgacccctccacctctatatacacacccacccacaaaagaaataataagattataagagtgccctcattgcagagccacagttgtaactatgccttgtccttacatgtacttagtgcctgttctgtggcagttcacagtgctgtagaccagcaccatttgtccaaagcagtattgatacttctggttgaataccttagtgcccccatctcaagtgatcatttggcaggaaaaaaagtacccatgtgacaatgtatgtgtagatgcatatggatagaccaaatcaggtgtgttcttatgttttctaaccgtaggcagctttctctctcttcttcctttttctaggcttgtcgtttttatgatgttgataatccagaaatttcaaattctctaccataaggggcaggtggtacagaaagaacggagtggttagagagtcattttctaatttatcaagctatatatctaacactccagaagtttttttaaccaaatatgcacacaacaaattagcatatatccttataatgggagaatggcatttatcttacaccatcatgtctacctgccagccagggccattgaacatacaagaatctaattaatatgaaaggactttgtgacagctaaagcaaaccccaaacagttcctatcatcacactcttaagtttttgtgggttttttttgttgtttttgtttttgtttttgttttttgagatggagtctcactctgtcgctcaggctgaagtacagtggtacgatctcggcttactgcaacttctgcttcctggtttcaagtgattctcctgcctcaccctcccaagtagctgggattacaggtgtctaccaccacgcctggctactttttgtatttttagtagagatgaggtttcaccatgttggccaggctggtcttgaactcactcctcacctcaggtgatctgcccactttggcctcccaaagtgctgggattacaggcgtgagccaccgcgcccagccccacactcttaagtttaactcccagtagtcactgaactaacctctgtctctcctgacattcatcagtcttcctcatctcaccccaacctctacccttggggcaatccaaggcttgatgtttactagataatacttttttcttttggtgtttaccacatcctgtgagtctgttaaggcaagaatgactgtcctcatttgtaaaaggagagacttaaggtaaagtgatttgcccaaggtcatatagctaggaagtggcagaactggtattgaagtacactgaagattttggacaaattcaagggatctaacttcattcagcagatggtagactcaaaattggtgttcaaagaggtgatatagacagaaaagtaaaacagtttcaaaggagaatttagagaagtttcaggatgacagatccagaagtaattatcaaaggcatagggggacatccttctactgggagaagtccaccttggtccttcttcaccaacttgaagcaaagcttcctgctgaatggaacctgtcccctcaagcaaaagtctctatgggaaaccctattggtaccagtggtgtaaaggcaggagcagagctagggtaggaaacacgcagatgtggattgggtctggacatgtaggcaaaagtgcttggaccaagatctgttgacttattttactactaacagggtcaggtgcccacctcacctgtaagctctgactaattttgcatttctgaattgtgtggtgtccgcatccctgctaatgagcctagtcccataagtacatatgtatgtatgtagacctgtgtgtgcatagtcattcatccaacaaaaattgactgagtgccaggcactttgctaggtgttgggagatatggcaggggtcgggaggaaagacatttcacctccttcatagatgtcgctatctagatggggagacagtaatcaagtagacaactaaacaaaataacaggaaatatgtactgtgtgggaaagaaacatggtgttgtgatcaataataatagcagggttgggggtagcaatctatcagatactgttcaggtaaaggctttccaagaaggtgacatttcagctcagaattgaaggatgggaagggaccagccaagggttcctcctcagcctgaggccaggtgagaggagttctggggtagagatgggggtaggatggcagggtggttggagtactcagtaagcttgggttctgctcctgttctttctgttccattccatccttgaagggccttctctcccttcctgtactcctacctgcctgtcccacctcattccctccaggggcaaggtacgggtgtatcttgtccccatcttgagctgttcacagttcttccctgcccatccctgcagatctcatggaaccaagggattgacttgtggtggcatgagctcatgcaagaggcaggggatgagtgtgagcccgagtggtgtgatgccgaggacccactcttcatcctgtacaccagtggctccacaggcaaacccaaggcaagtgtgtgtgtgtgtgtgtgtgtgtgtgtgtgtgtgtgtgtgtgtattatgtaggggtaagaagtaagtttctgaggaaacaagtaatgaaattatttttttcctacaaccctgagttttggaaatgtagcattgtcttttctaaatcaaattaagacataaatcctcaatctataggtggtgaggcccagggtgagacagttcaggtggagggttttcatacagctgacatggatgttctttccctatgcacccatggtttggttgaaggagagctattctgttaactcaaggccaagggtgggcacagagatccctctcaggcttctaagaccataactcttagagttcaattccttccacctggcacactattaacatgtagtcctctgccagcacacaccatgggagccggaaacacttaagaaaactgtttcttccattgacttgaaagctatgtcactctaccttctgcccactccacccctaaattatctccatatgctttggaatatccctcaataagtctttagaaacacaattttggcctctctttcatagagatgggggtagggatggaataagcaaagggaattatcttttttttcccactcactctgatggtgtgtaattgagtgtgtgggcacaaatacacaacagagggactattatgagtgtgctatgagtgctcatgtgtgagtgatgtgggtggctctgaaataccatctgagggtgctggtatgaatgatggcctgatagacatatgtgtcatcaggagtgtgataaaggagatgagatgggagcatggagaaaaggagatggaagggagatggatgctgtgaaaagggtgctggcagggctggaatccctgaggaggatcttcctccagctctgcccagcctccatttggtggtcagtaggggtgggcataagaccctaacctgttccccattcttcccacagggtgtggttcacacagttgggggctacatgctctatgtagccacaaccttcaagtatgtgtttgacttccatgcagaggatgtgttctggtgcacggcagacattggttggatcactggtcattcctacgtcacctatgggccactggccaatggtgccaccagtgttttggtgagaagggagccacctggcctagctgggggatggacaagattatcctgggtgactacctcccaaggctgcttggtctagagggagggggacttatacaatcatctgttttctggagaaagagaagtcctgagggggttgcgtatcctgactaggatggtatcttggcttgtctggccagggagtgaagatatggttggtcagaaagggcaaaatactgaacctgagggaatggtagggggatgaatagaaggactattaggaaagactgggaatgaccagccttcatgggtcagtttgaggggattcccacatatccggacgtgaaccgcctgtggagcattgtggacaaatacaaggtgaccaagttctacacagcacccacagccatccgtctgctcatgaagtttggagatgagcctgtcaccaagtgagacctcttcccagttgctgccctgtgggtatccctcagagctgggtgctggcctttgtacagtctcttcttttccattgtcccaactctctgacctggaatagaggatggggcaagagaaaagcctgggtatgtgtgtcttccagtagtactcagagccttcctctctcccattcccctgccccaggcatagccgggcatccttgcaggtgttaggcacagtgggtgaacccatcaaccctgaggcctggctatggtaccaccgggtggtaggtgcccagcgctgccccatcgtggacaccttctggcaaacagagacagtgagtgaagggtacagaaggctggggcccagggacaatgtgggaagattgactcaaatttctcatctctgacttccccagggtggccacatgttgactccccttcctggtgccacacccatgaaacccggttctgctgtgagtgatgcttccctggctggtcttgggctaggcagggatggtgtcttggggcacttggcctagttagatagtggagaactggactgacatgtgtgaagaatttggggttctggggccccttgggagttgagtcagagttgcctcattcctcttcttgggttctgtctcccgtttgcttctagactttcccattctttggtgtagctcctgcaatcctgaatgagtccggggaagagttggaaggtgaagctgaaggttatctggtgaggccctggcccttgggagtctttaaggagagagggaaagggtctgccaagggtactttgctttagagttaataacctaatctctcctggtagctgcttaggactgaaacttcatggttggaggtttgctcactgagagaccctggaggggaccctcgatactttgcctgcatctcttccttttgggccataagtctcctaagggcgttttaagagttgctcagattcctgatggtacctttttgggtctggaagactaagtcccatcttcttttgacaaagattctacagaaaggaggctttataacatagtagaaaatcacgtaggatctggagtcaccctgcctgggttcgaatcctagctctgcctcttctgtgacctcagataagttatttaacacctctgaatctacattttctaatttgtaaaatagggttaaagtggtgtctctggccgggcacggtggctcacacctgtaatcctagcactttgggaggctgaggtgggcggatcacctgaggccaggagtgcaagaccagcctggccaacatggtgaaaccccgtctttaccaaaaatacaaaaagtaactgggcgtggtggtggacgtctgtaatcccagctacacgggaggctgagacaggagaatcacttgaaccggggaggtggaggttgtattgagccgaaattgtgccattgcacttcatcctgggcaacaagagcaaaattccgtctcagaaaaaaataatgcctttgtctcctatggttgcttgcttgattgagttagataatccacatgaaggggttagcagagaaactaacaattagtacttgataaacattagctgttgtgattattgtattcatacttgcaggagcctcacctgtcccttcaaccccaccccatttcactttcccaagagcaagttagtaacagggacagggcttacatccaggccttctgactcagcctagaattccatccattccatcgatctgctgccaaagaatgttactgattgggcaataattatttacttggtgtgtgggcaccactgttttttaaatgagtgttttcatttgtatcaaactggacctgctttcctcaaggattgcccaaaaggagacacaaatttactaaacacttatcaataatagaacaccgtgctaggcaatttccatatactattaatttaatcctcacaataactttggaagacagaaagtattttctctgatttacagatgaggatcctgaagctcagaggggtaaagttacttctctgaggtcacctagctagtaagtggtagagctgggattccaagccaggatcctctgtctccaaagcctgtacttcattcaggacactttcccccacatttagaaaagctgtaattatcttccagtgagacagcatagcaaatgtgatcactgtcccttcctcactccccaggtgttcaagcagccctggccagggatcatgcgcacagtctatgggaaccacgaacgctttgagacaacctactttaagaagtttcctggatactatgttacaggagatggtgagccttagctatccccctcttgcacctcccactaagacatgtaccttccacttccattttcaggaagagttggtgtgttgctataaaataatacctgagactgggtgatttataaagaaaagaggtttattttggatcatcattcttcaggctgtgcaggaagcatggtgctggcatctgcctatggtgaggcctcaggtagcttccaatcacggcagaaagcaaagggaaagccagtgtttgacatggcaagagaggaagcaagggagagagggaggagataccagcctcttttaaacaaccagatcttacatgaactcatagagttactgcaagtacagcaccaagccattcatgagggatctgtcccccccgccccccccacctccccggccttgaccaaaacacctcccaccaggccccacctctaacactggggatcatatttcaacatgagatttggaagggacaaacatccaaactatatcagttggttaggggtaaagaaaattagagaagaatgtgtcctacatgtcagtatctggtttctacgcagagctacaaagactgtaagggcaggaatgagtatagcaggaggggtctcagaatggtgccatccgaactttgatgtatgaggaaagatggacaatgtatgctcctgtgttgaaagagatggggcatgtggcagtgcatgactattatgtcatgtttgtctttatgtctggagtctgtgtttctccatctatccatctaccaatccattcatccataagatctgagcactgtgatcctgtgcccaggcactgatcatgaataatgtagtcaaaatctcctccctcatggggattctagtaaggggagacagacaaacccaacaaacataaataagcttatcttagatagagataaatgctgttaagaaaaataaacagggtagcatgatagtgtgtgcagggatggctactgtacacaggatcgtcggagaagacttctctgaattgacatttgagcagaggcctgaagggtgagaaggaaacaggcatgggaaaatctagagtaagagtgttttgtgcagagggacacagcttgagatgtctgaagaatggactgaagcctgtgtggctggagcgtagcaagcaaagggaagaatattacatgacgttggagacgtacataatacagggagggtcttgtgggccatggtgaggagtttgaattttattcaaagtacagtgggaaaccttttttttgttgttgttgttgttgttgtttgttttttttttgagacagaatctcactctgtcacccaggctggagtgcggtggcacgacctcagctcactgcaacctccacctcccgggttcaagcaattctcctgcctcagcttctcaagtagctgggattacaggcgggtgccaccatgcctggctaatttttgtatttttagtagagacggggtttcaccatgttggccatgttggtctcgaactcctgatccacccaccttggcctcccaaagtgctgggattacaggcatgagccaccatgcctggccaccttttggggttttaagcaggggagtgctaagaattgatttactgtttagaaaataactttgctggatttatggagaatagagtttaggtgagtatactattggcatggaacaaattatcccaaaagttggcagcttaaaataacaaatattatctcacacagtttctgaggatcaggagtctgtgaacagtttcactgggtagttctcattctgggtctcttgtgagtttcagtcaagctgttggtagggcctgtagtcatctgaaggtttgagtgagcctggaggacctacgttcatgcttactcgcatggttgttagcaggaatcctcagttcctcacctcaccataggactactcaatacatggcagctagcttaccctacagcaaatgatctgagacaatgcaaccgagacaagctaggtgtcttctacaacctaatctcagaagtgacatcctatcacttctgccaaatcctatgatgacacagactaaccctagtacaatgagaaagaggactgcagggctatgaataccaagaggcagagatcagtggtgccctcttggaggctggctactacagtgggcaagagtggaagcaggaagacttgttagaaggctattgcagaaggtgtagcagtttggtaatgtggatcaggtatcctaccgtagggtttttatttattaggttttgcatttcttcccaggctgccagcgggaccaggatggctattactggatcactggcaggattgatgacatgctcaatgtatctggtgagggccaggggccaccttcccatcttattaactctgctcctctgacaacacccagccgaagccttccgcaagagcccaggagtgtcctttggccagaccatgtactaagtgtagcattcagttctgggcccaggttttagaggagtaatgaacactggaatgtgcctagagtaggggaacttggatggtggggtgactgaaagcatgtcatctgaggagtgaatgaagggtcttctccatttggccagaccaggactgccccatgggtacagatggagcatgggctggggcagagcctgggatctctctcatggcacttcctttcccttgacaaggacacctgctgagtacagcagaggtggagtcagcacttgtggaacatgaggctgttgcagaggcagctgtggtgggccaccctcatcctgtgaagggtgaatgcctctactgctttgtcaccttgtgtgatggccacaccttcagccccaagctcaccgaggagctcaagaagcagagtaaggagcctccctgggcagggactatagggtctgtcttggaggcccagttatcactgcaagttgttggggaggggctagagcaagctgctccccaaaccacaaacagattccagggggccccatgggctgattgccctcttcctgttcagtctccactagtctcccactaggataataataatagccaacatttctagaatactttgtgccaccgctaggctaagtgctttaaatgaattaccccacttaatccctagagtcacctccatgaaacagatcttattgttaccttcatgctaaagatgatgaaactgagactcatggaagttaaatcacttgcccaaggccacactgctagaaaggtggcatttaaactctagcaggctcattctacagcctgagttccataagataaaatgagagagtaaagagacaagtgtgttgagagcaagagaagcagtgaacctgaggctgtctctgtgggcagggacttgaggaggaaacaggtggggaacaaagccatctctactttgatttttgaaaagtctggctaagggtgctgaagaaatgcttgatgatttgttggttacagttagagaaaagattggccccattgccacaccagactacatccagaatgcacctggcttgcctaaaacccgctcaggtatgttcagaggcctccatggattgggatgggctgaggcctggtggtggtggggtgtgcgtggatgaaagcctttggcagggctagggtgggtcagtgctttcaccaagtaactagaggtctgtggttccccagggaaaatcatgaggcgagtgcttcggaagattgctcagaatgaccatgacctcggggacatgtctactgtggctgacccatctgtcatcagtcacctcttcagccaccgctgcctgaccatccagtgaacatgatcctgacctttacctaggattcctcctgctccaaactttgcccatcctctttgccccctcaggagtgctgagggccagtgttgacccacactaccctcccttgaccagctgtctgggaccggaaaccagctttgtctccaggtagagacaacatcctgtgactgccaggcagaaaggacagggcccaggtcagcctcagtctgctgtgcctccagactgcagagctctcagaacccagaacagagacgaaaaggctacctctcctacccaagttaagtgttcaaaggggatgtgagggcctccactgaagcagggaggcagctgtgtaatcctatgtcagctctcttaggaagccccagtacttatattgggcatgcacttgcccttaaaaacaatgatttgtgagtccaggaacaatttactatttttaaaatattttgctgcttctgttctgggtctgaattcccttttgtgccagatgccagtactgtctgcccattggctccaggggctgtatgggcagattcagtctccagagggtattcagatcatctgcttctttgaaggagtaaatgtgttttgttcctagggccagaggagcttgtcttccttgtcctctgttcccaccctcccctgaacagaacccagcccataagagacattctcagatgaaactctgttttcttgccccagtcaggctcaagccctgtggttgtaggaataaagcctgtgatctcaagaagtggtgacttgttttcttaggtatctgtgccctgaggctgtatattcattagtggctctgatttgtgtggcagatgggaagggaggggtatttcctaggactatccccaatatcttccttctagaacttttggtttgggcagagcgaaggaggcttcactgacagggcctttgacaagcccctgagctaagcaggaaagtgactgaagccagttcacaactgttatgtatgtcccatcttggttgccttccctcctgggctcctgccagggactctcattcctccctgtgatccagtaagagcattagtgggtggctaaggattgaaacttcagggttccacctgtagagactggtctagggggaccctgattacagaccagtcacttccctgctctaatacatcttaagtgggctaacgtagattacagctcccgcctcccctctatgcacgaagtaaggaatcatcactgaatcagcaatgcagttttatttaaggcagaattagggaaaggctatgcccctccactccccctcctcctaccactcagtcctatcccaagtcaggcactggaacctgctgaaaaggctgatgaggggctgacaggagtggggcagggttcatggacctttacctcagagcagcttaccctgagctatacccacatctcaaggatttgggggcgtctagatctcatctaagggagacacaacttttctggtcctcagatggaaagctgggggaaggtaccagtatttacccttccataaaaactttggaggtctttaggaggatacccctcaggagggctaggagaggaatgacaaatacagaggatagaaggtcccgtggcctggttgtgccctcacacagggtatgggttgtccaggactgccactcccgctgccacaccaccatctgcatgctcgatggctttggttcgaagtagatgccccacgtgcttgttcatcacgagtgtcttttcctgcctatagaaatggaggcaggggacacacatcacctggactcagccccaaacccaggaccttccctggacccagctgagcagtacctgggtaactgtctataccaagaaagtgctaggattttagagtctctatgcctctctggagtctccttctagtcctaggttgtcaaaccatgtgttctgagtcctcttggtgctatttggagtttccttcacggttgcaaaggacttctcatcagggcttcatctgataccctggtaaggtgggcaggtcttgggtccttggcctcatttaatagataaagaaacaggtaataaagctagtgattggcagagctggcaccgaagcccaggattcctgactctttccagtgttcccctctaggctggctcacttggctggcactcttgcaagcaggtagtggaaagagcttctcctgattggctcacctgacatagaccccaaagatgcccagctctgaaatgcactggaccactcgggcagggctgccaggccgtagcaggcaattctcaaaaggctcaggttcgatcttctccatgaggatgtaggaggccctctcctcactgtccttcagctgtttcagggcctgtaccatttcctccccatataggttgttacctgcaatgaaactggccagtcaccctggaccctctgcctacctcctccatcccatgccctcacttttggggccacatgggcaagtcagcagcctcagttcctggcacccgctcagtgaagccagggcatatctggcttctcaggagggaagctcactttgacaggagagcccttactcatgcagtgaacacatcttccactacactgttctgccctggttctcctcctacctacagctgttccttctcaagctccattgctggctccttctcttaaatgctggggtcccaggggaattggtcctccacgcttgctctctcccccatgtacattttcccaaggagatctctcctattcctgagtctccatctataccctaaaaattgttaacttccggccgggcatggtggctcacgcctgtaatcccagcactttgggaggccgaggcaggcagatcatgaggtcaagagattgagaccatcctggccaatatgatgaaaccccatctctactaaaaatacaaaaattagctgggtgtggtggcgcacacctgtagtcccagctactcaggaggctgaggcaggagaatcgcttgaacctgggaggcagtggttgcagtgagccaagatcatgccactgcactccagcctggtgacagagcgagaatccgtctcaaaaaaaaaaaaaaaattgttaacttccaaatatttaatgcaggctccctgcttagacatcatatgactggcccccaaacaaactcaacttgtccaagcagaacttattacttctgcctgaacctgcccctcctggaccttcctactcccaatcaggcaaaaggtacccctgagtcatatttaactcctcccttccactaccctctcactatctaggacatgtctctccagttggccccatagtcatagccctagcccaggcctctacgttgctcttctgaacaactgtatcagcctcttccacggtctttctgcttccagtgtctcccctcattccaggacatcttctacaatgcagaaactgtaagttttgcaagttcccaccactgctaaccacttgagtcctggatcaatgtgtcccttcctggcttaaaactccctaatggcttcccactgcccttaagataaaatccaatttctcagtatatattcaaggccctttataatcaggatgcaaaccatttttccagcctaaatccctgtcccctcccagctccccctccagcctcaccagtttctcattaacctccaaacatctcacactttcatggcccggtgccttggcttgaggttgtcccttttgtatggaacactcttcctcctttccacctgggaaattcctacccacctcttaagacaaagattaaaaaaatcctctcctctggagaggcagacatgacccctgacctcaaggagtttcaaactagaaaggaaaacagacatgtattctctccagtctcctaatatgaccctactctacttcccaacaatctacccacaggcacctcaggtaaaacttgtccaaacccttcaatgctggttaatcagattcccctgtgctcccggacttggtcacagggtcttaggggacactgtccaacatgtggcctgtgtcagttccaatagtttcccccatgcccgggactgtgcccagagtaagtgccaatgagcactggccacagcctgctagtccctctcattgaggagccctgcaaagggagatccacctacctccaccctctctctggggctttagcacaaaccggctaggggcagcaagggcctcggcgatggcctggtccccttcttcaccctggcaggaggcagaaagcagttatcaaaagtttaaaggctaaagaggcaagaagcttaggtccagctggttatgcagagcagcatcagaggaagagcaggagggagaacagccacaaattccttcaggcaggatgctactatctggatgacactcccaacaaaccccctgcagcagccgatgcaatgagaacaggcctttctttagcaacagctcagggctctgcagcaggcagcctgatacacttctcaattcttgccacctgccttagtcccttccctctggttgccatcctcatctctacctttgctgagggagcttacaatggattccagcccccatccttccattatgaggctgcccttctgctcagagttctaggggttctccagagcatcaccaaccttgccagctccaccttccccttgtcacaatgccagctccaccctccccaacacattgggctgtaggtctctgccacctaggaggcctgtggtaggagaaacaggctgcccacgtaccacatccagtgagtagaggccagcaaaggtggcgcggaggcgggccacagcctcaggctggccagggagcaacatctccagcatgcccggcctgcttagctcctgctgcaccttcttagtcccagccagctgggtggcaatgtctgggcacttggcagcatgtgacctctccagcagtagacgtgcttcccaattctgcagagggaagaagacaaaaggaattcgactttattttacttcagctgacgtttactgaacatccatccattaggtgccaggtatcatgatttgtatcttcaccctcattatcacccaggatcattctaacatccttgtgagccaggtgtgatatgttgtagttatgtatcattgtgccagactgtgagcccctgcaaaggcaagaatcccccaatctgtgggaaacaatagaaggtgtaagggtagaacatttgtctacgtgctcagcttcccactgtgttccatactccctaccatggccttcaagatccttcaggagctggctcctgtctactttttcaaccttgtaccatccctgactcctagtctctgccattctactcacacaggcctgtcattcctcaaatcacaaagctctttccctcctcagggcctgcactgcttttccctcaacctgaaacccccttcctttcggcttttcccatgcatagctggatccttaccatccttacatctcagctcaatgtcaccttttcagagaaggcttccctgtccactctatttaatgtggatttcccataattctctttttacccagttgtttcattgaaagcagttacctgagactaaaacacacacatgcacacatacacgcacacgcacacaaacatacacacacaaatcccaatttttttttcctatttttgtttactttttttttcttttgagacgtgggtcttgctctgtcacccagactggagtgcaacagcgcaatcttggctcactgcaacttctacctcctgggctcaagtgatcctccctcctcagcctcccaagtagctgggactacaggtgcacgccaccacacccagctaatttttgtattatttgtagagatggggttttgccatgttgcccaggctggtcttgaactcctgagctcatgcaatccacctacctaggcctcccaaagtgctgggattacaggtacgagccacagtaaatggccatatttttgtttactttctgatgcccatttctctgaccagactgtgagctccatagcacagggctcttatcattttcctcattttctgttgtatctccagtgtctaacacagttcctggcactttgtagttgctcaataaatatttgttgttgttgctgaataagttgaaatttgagtggggttctgaaggacaggtagagcctgacaagtgagactcaatagggaagggatactcaggctaagagaataatatgaacacaggtctcaagtggatgatcacaggatgaatggtttattaccacaagagctgagggtataaaaggcaaggaaacagcaggggatcatgcctcccaactctggttcccattctcatgcaatggggagacagtctgtccttggctccagaccactgcaaactgcacacagcaggatcaggtctctcctgtgacccccacccaatgctgtccttcctttgatactactggtccacctgtagcaccttgacctgatcttcatcaataaccccaggaacccaactactagtctggcattccacgcagaatcacacgtgaccagaacatcagaaataaacccagagaaataccccattatggtagaagcaggaaagcaaaaccaaagataagcaaggacttgcccagggtcatctagtaagtcactaagccttctagatctctctccatgtctaaacctgctctgagctgctcagttccctaaaaatgtctacctcttggccaggtgtggtggctaacacctgtaatcccagcactttgggaggccaaggtgggtggatcgtaaggtcaggagttcgagaccagcctggccaacatggtgaaaccctgtctctattaaaaatacaaaaattagctgggtgtggtggtgggtgcctgtaatcccagctactcaggaggccgaggcaggagaatcgcttgaaactggaagtcaaaggttgcagtgagccgagatcgcaccactgtactccagcctggtcaacaagagcaaaactctgtctcaaaaaaaaaaaaaagtctacctctttaaacactactttccttccttgttatctcaaactcttctaagttttctttgtcgtgttttgaaatctagacccatttcttttttttttttttgagacagagtctcgctctgtcagccaggctggagtgcagtggcatgatctcaacttactgcaacctctgcctcccgggctcaagcaattctcctgcctcagcgtcctgagtagctgggattacaggggtatgccaccacgcccggctaatttttgtatttttagtagagacggggtttcaccatgttggccaggctggtcttgaactcctgacctcaggtaatccacctgccttggcctcccaaagtgctgggattataggcgtgaaccaccgtgcccggcctagacctatttttctaatagacagtttatctctcctgtagtcagcaagttgccaccactgctaaccacctatctaaagaaaaggatgttctatcgagataccacctctatagagcctcctcatgtggagctcaaccctcggggggagtcctagatgaattacagacctagaaggagccccctcagttttctagtgtagctccccccgctcatagaaacagacctagaaagggtcaggaacttgcccatcatcacacagaggcagtcaagctcatgacctccagctcactgcccatggtatttctaaacttatttcctcctttatcatctcccagctgagagcagagcttcttagcctctccatgatgtggatgttaggagcagaggagaagaatgggaataccatcggcctgaaagtcagaaaacctgggaacttcctgtagggccttagagaagcctctccatctctctaaacgttagtttctccatctgtataatggggataattatatgcctcaccgagtggttgtgagggttaaatgaaataatggatgtggaaactaatgaaactacatggtaggatagcaaaatgaggtgatataactgtcattaacatgaatgaggagatgataaaactttctgattcagataaaggaaaggtaagagttggcaggaaaaaaaatggtcagcagtatgctggaactggcttatatcaaccagtgagagctgattgttgttaaacatttgccagcacatctctggaaacagtgtaaatggctgaagctctgtggattcctgaggattcaaattctagaagactgtgtagagtgataggtagcaaaaggcttgagggaggataggaggttctagcagcaagctccctgagaaagaagtgaagtgaggactcggaaaacccaggttgttataagcctgaattgggtctctgtggagctcttgtgggtcccaggaggcaaagaatggtctcacagaaaataccaacctgtagactgtactgacgaggcatgtagccatcccggaagtaaaccacagcaatttcctggccatccctggaacacaggatggagaaggctgctgtgttaaattataactgatttgttcagtggttcaatctatttcagggtgcatcaagatgaatttggctttttcaaaattcagcccacagtgggagcctggtcaggggttcactggaaccagtgaaagtagatatccacactaccagggcttccactgaaaacagggaggtgtgccatacagaatactttagaatatgccagatttagagtcattctaagaaggccagaaggaacaagaaggtcactagaatcaaatttggtaaatgcatacaaatgttggctcgaaattaccgagcagcagaatcatactgccatgtgtagtaaaacacactttatatttccactgcttaaagcagctgaaaccagaatgaaaaaatttttaatggcaggggtgaaggtgaaaacgcaaacatgtaaaatgatgagtctgattaagacacaggctttttaaatgtcttttccttttctttgacctatttgatattgtctagtttatctgaaaagtaaattaactactttgtttagttatgataaaagcacattttgaaaaacagtgagtggtattgtgaaattccatggacagttttaattttaacaatcacaaaggtctaggtctaaatatatgtgctgcaatgctacccaaatatgtagcaccaaatctacctggtggtggcccctagagaaaaggataaggcttggcttggaacacaaatccaggctcgagctcagacagtggcatccagaccaatcacagcatgagccagctgctcctcttcctccctgactgcccagctcagcttctcaggcctgacctcaccttactaggagaggcaagaaaacttttgggaacttagggcatatgaaaactaagatgatctctaaggagaccctgatccagaatgtcaacagctctgatagaagcacagcgtggctggctttctccaaaatttcctgggaggatgagatatttcaggaattatgagagaaggaagcaagccatcacatctcccagaagaaagaatcattttggggaagagggtggcaggatgagtttcataaaccagccttccactggattcttgggaatgcttacacaaacagccttcggtcttggtccagagaccccttttcagagatatcttcaaatgttcgtcggatcacatggatgttcctgggaaaaatgggcaagagccagagggaatggatgctatgttctgagtgccccacccctaatcctggagccacacctagaagtcccccttcctttacttacctggccagtagctcattctctatggcacgctggtcaaatatgtttctttccttctcttgagcaatcagtagcaccagagcactggggaaagagcacaggtggcccgaggctactatagaacttgttcttcttttgtttctcccctcaacccccataccgccccacctcctggaataagaataagaacaccgcttccctgaaagaacagatgttccctctctcaggaaccttgagattacctcaggcatagacacctgatgctatcacatatgatttcctgaaaatagaaaacttcaaaaatgaagatgcctctgacccttctccagtgggcagatgaaatattgtaatgatgtcatgggttgatgaatttctgtgcaaattaaaatttagatttaaaaccatctcaaaaacccaagaggactttttcttagaacttaacataattctaaaatctttctggaagaataaacaagtgggagtattgaggaacattttgtaaaagaacaatgcagggggtccggggctaatggctctattactagattgtaaaggatacaataaaggaatgtggttcttacacaagatggaaccctacagaaacccacagggccaactacaaacaacgacattatctcctgggccctcccaagattcctataatgtacacagggccacatttgatctcatagtattaatgagatcactagggcttatgtggcttcttcctctctgattattcatgtatttcttaaagaggcaggggcttgagggctcagggaaaagcttatgccagggaactatctgtttggctgccagctaacatatttccgttgtcaaagataggtccagtcccctaagagattcctagggctaatgctcagcagtaccaaactgcattttttttcttttacattttattttatttatttttttgagacggagtctccccctgttgcccaggctggagtgcagtggcacaatctaggctcactgcaacctccaccccctgggttccagcgattct

SEQ ID NO: 382 - DNA, 61273 bp, Homo sapiens
ttataagaacttaaagtacctgtactctctcacgcagctttttcagagtgtgatagcattatattagtaaaatcagaatacgtaatgtgatggcagtccacctacttactttcctaactggttataccctttccccacctccccatctcttcccctattgtttctgttctgtcttaggttaatgtatcctatttctgtaattctaggacctttaataaatcttttgggcaatggagagtgagctgacttaaaggtggaaagggctagtgaatggatgtggctaatttgtatttctctttcccagcaaagccaaaaagccaagtgatgatctaaaactaatgatatgcatcccacacatggttgtacacgtgtttcttagtttgaaaatatagcctgtttgttttctttgactaagtagaaattaacattggcctctggcagctagaggaagctaaaggcaacagccatacttttgggaaatgatagatatgattttacagataatgttttattattgttttttatggtcagattgccctactgcagtgttttggcttcaacaaatacttttcctgatgttcacaaatcattcagtattcattcaggatatctgtgctggagatatagcttacaatattataatgtaaaccaaaattatgaagaagggaaatgaaattttaagattactaaggaacatacaagcctttcagtgatagacaagtaattagatcccttttagacttaaatttggatttcagtcacagctctgctttttgtcctagccatgtgatcttgaacaaattgtttaacctctttgaccctgttttcttatcagtaaagtgaaggtaataatatctacctcatagagctgttttgtaaggcataaatgaggtaataaatataaaatacttaacatattacctgatatataataaatgctcaataaaagcttgctattattattcttatgtgattgaaaatttttcttcaaaattactttgtgtttcttaggtagcagatcaaccttatgttcaacagacattcagccttttacttccactgttgggatttttcattcaaactctagatcctaaactgatacttcaggtaagaataatgaccagattgatactttgtttgctaaggaggttgctaaaactgctatcatgtaaaataactttctagaaatagttcctttaaacctcctcttgttgtgtcatatattgacttgtcttcatcaaggatatctcatttctctttcttccttacagtattgttaatatatggcgctgttaattcagcctttatctgttcttctctgtcaccctatactgagcagtcaatactttttgttattactgttaactacccactgcaaacccctgaggttaggagtcatagttcatgtgttgaaccctgcattcatagcagtttcaaaagcatttcagcagctgtgggaatgtggaatctaaccagtgtgtattaaaagatagcacctattgtttctttgaaaaaataaaattattttgaaagaagagcactgctgaatttcctctttggcctccaacttacatggctaggacaggcagagcctgggtcactgtctagggaacccttgtggtgcctcagctgtgcctttcttttggaagttctaagatgacagagaaagtggaaaagcccttcagctaaactgaagtgatttagaggctttggaatgagtccatactagacagaattgatgccccaaattaagagttagcttaagctcagggtcaggtaagaaagataaacaataactgttaagaggagaaactacccttcttatttatgaagatgatcgaagagatgattcctgtcacagtatgtggtggaacagaaaggaatgaaactagtaacagctttgcttttagtagctgtttttaatggtgtatgtatatgaagaagttagcaataacaagtatgtcctataccatatgtataacatggattttactaagttataaagagtcagaatacagtaattaactcattgaatgcaacaatttgattctgattctgaaagctctaatatttttagaaaaaatacaataattttgatataatgtgcctacctttaaaaaacccaaataaagttctaaaatttctaaataagtagattgttcaaagggtattgcttcctttataaaagatttcacctcaagattcttttaaattgggggtttgcagattatggccttctgtctaaattttgccctcctgttttcagcccaagagctaggcatgaattttaaaggtttgcaaaataaaaaataatatgtaacagagaacatgttgcctacaaagcctaaaatacttactatttggcctgttagagaaaaagcttaccagtccttgctaaataatgaacttctctcaatagaattttaaatacaggcataccacagagagattacaggttgtgttccagaccaccacaataaagtgagtgagtcacatgaattttttggcttcccagtgcatacagaagttatgtttacactatactgtaggttgtgtataatagcattatgtgtaaaaaatgtacataattaaaaaacactttattgctaaaaacactaatgatcatataagccttcagcaaaacataatctttttggtagtggagggtcttgcttcagtgtggatggctgctaacccatcaggatggtggttgctgaaggttagggtggctgtggcaatttcttaaaatacgacaatgaagtctgccacatcaattgactcttcccttcatgaaagatttctctgtagcatgtgatgctgtttgatggtattttacccacagtaaaacttctttcaaaattagagtcaatcttctcaaatcctgctagtgctttaataactcagtttatgtaatactctaaattctttgttttcatttcaacaatgttcacaccatcttctataccaggagtagttatgtgtcaagaaaccactttctttgctcattcatgagaagcaactcctcttcaagtttgatcatgagattgcagcaattcagtcacatcttcaggatctacttctagtttgctagctatttctaccacatctgcagttacttcctccacggtaggcttgaaccccccaaagtcatccatgagggatggaatcaacttctaattcctgttaatgttgatattttgacctcctccaaatgaatcatgaatgtttttcatggcatctgaaatgatgactccttcccagaaggtttccaatttactttgtccaggttcatcagaggaatcactatccatggcagctatagccttataaaacgtatttcttaaacagtaagacttgaaagtcacaattattccttgattgatgggctgcagaatgactgttgtattaacaaacatgaaaacaatattcatctccttatacgtctccttcagagcgcctggttgagcaggtgcattgtcaatgagcagtatattttgaaagaaatctttttttctgagcagtaggcctctcaatagtgggccaaaaaatattcagtaaacagtgatataaacaggtatgccatcatcctggctttgttgttccattgatagagtacatgcagagtagatttagcagaattcttaagggccttaggatttttttaatagtaagtgaacattggcttcaacttcagcagctgcattagcccccaagaagagagtctgtcctttgagctttgaagccaggcattgacttcacccctctagctatgaaaatcctaggtagcatcttcttccaatagaatggtgtttcctctacattaaaaatatattgtttaatgcaaccacttccatcagtgatcttagccagatcttctggataattgactgcagcttcttcatcagcacttgttgcttcaccttgtgcttttgtgttacggagattgcttcttaaacttcacgggtcaacctcattagcatcaaacatttcttctgcagctttttcagctctcagctttcacagaattggagagagggcctggctttggatttggctttggcttaaaggaatattgtggctggtttgatctatccagaccactaaaactttccacatcaacaataagactttccgtgttcattggaatagcatttttcatttccttcaagaacttttcctttgcattcacgacttggctaacttgcaaaagaggcctagcttttcacctctcttgacttttgacagcaccaggctgaattatctttagcttttgatttaaagtgagagatgagattatacttttcactcgaacacttaagaggccattttagggttaattttaatattgtgtctcagggaatagggaagcccaaggagagggggagagactggtgacctacctgttggtagaacagtcacaacacacaatttattatatttgccatcttataggggcacagtttgtggtgctccaaaacaatgacaatagtaacatcaaagatcacaaatcagcgtaataaaatcctaatgaacaagttgaaatattgcaggaattaccaatctgtgacagccatgaagtgaacacatgctgttgcagaaatggtacaggtagacttgttcagtacagagttgccacacaccttatatttctaaaaaaaaaaaaaaaaaaaaaaaaaaagcagtatcttcaaattgcaataaatcaaagcacaataaaatactgtttgtacaaaatatgttttaaaggtttggtatataaagtttttcagaaacatgtatacttttattttttacgtggttggaggcaggagggtgtggtaagaataatgctttaactgttaacttgttcataggattgtcttatttaaattctaccagtgaagttcaggggctgtggtgtgtttgtttttttctgggtttggttttgtttcccctccccacatttccatccaaatcttaggcagttattgtgtctgtacaaaatactggtattatttataactgttctttggtcttcacctctgtaggcagtaactttgcagacctcgctacttaaattagagcttcctgactatgttcgtttggcaatgttggattttgtatcttctttaggaaaactttttatacctgaagctatccaggtaatattgcttaactctgttcttgtattattaaaacaaaatctctataagagttagtgattaagggatttttaggctttttctgaaattttgcaattactgacaaagttggaaaaaaaaaactatgttccagacagattataaaatctatttataacttataatacaactcattttaagttcttttcttttagaaaaatatatgttgatacacaaataattagttggctgtagtctaccatattagattcttattccagttgggttctaatacatagttcctgtgtatttgtcttatagggaacagcatgtaattaggaaatttggtaatttattaaagttattctcttcgttttttatccatgaaagagaacctgtttttaaagacgatatttttgaaagtgttgcaaaatatgtatagctgacaaatagattatttataaaattatactgcactggcctggcaatacacatctactgaattttaaaacctcagtaaatgtatattaccaggccagtacataatttaaagaacttacagcaaagagatcttcataaattgagaattacgccttccttattactatagtcaaaatttagtaattctagtaattgacacttcaatctccaagggagagactataaagagttcactaatgagaactttcttacataattaaagcaaacacattatagacagtatctcagaacatgtagattaaactctttgaaaccaaaaatttaatttctaaggggctcttttatttgttcataagttaacagtatcccatctgtctccatcatgttaaggttttatttcatgagataagcatagaatgttgacagcttttcagctctcttgacaaaaatatccaaagacacttggcatctgagctgtcttctttttaccatgaaataaatctattccaaaatgctgcttcatttgtgaaccactatggactatgcacgggcctagaaattatgaaacaaatgttttataagcagaaatcgcagtgccttctgtattcccaggagtgaggtcaagacctgaagaaatttttgagattcatcagaacataggaggcatttaaagccatgaaatgagattgactgatttatccattcgggaaagattacgtttttgctgtacccagtgctgttttaatcattggcaatgcagtaatgaaccaaactaataaatccccactgttagcctgtttagaggcaataaacaataacaacatgatgatatgtgcagtatattaaatggtggtgagtgctatggagaaaaataaagcagggaaggaagatagggaatatgaatgtgggggtccaatttgaaatgggatatatagttagtgaagtcctcaccaaggtgacatgcaagtaaaaacctgaaatgcaaagcactggagatgggagcatgcctcatattcagggaagcaagtatagctaacacaaaggtagcaggactttgcaggtcatttgaggactttggctttcactaacaagggaaatagggagctactggaaggatttgagtaaaagagtgacattacctaatatgttttagtgtgtgtcccctgggacaggattatgttaacttgacaacactgggcttattgaatgtatggctattttatgattatctattatggtttcttttctctattataataaggcttggttcttttaggacagaattctgcccaacctgtcctgtatgtttgccttactgctagctgacaggagttggctgctagaacaacataccttggaggcgtttactcagttcgctgaggtaattataaaactgatttatcacagtgactttcaaaccattttaatatttcaaatattccagaacaatcccaaaacatttattgaactgcttctgtattgcaatcggaaaattgtctgaagggtacattactcgttatctcttttacagcttctcaaaatgaggcttagataaatgaagtgaatttcgtaaggtcctctgaataaacaaggaccagaacaggcatacacagcaggcctactgatacagacagacacagacacagtcttccagcagatagtatttttgggtcaaatgataatacatttcattttgtgctatcagtcataagggttaggctgatgaacctaaacctgtaagatgggttgctcctttactcttactgcatttgctgtatagtcatgcctatgatcataagggagtccagaagcattagtatgacccagcagaagtaattaaagcttacaacacttgtacagaagttaattttgtattatccttagggaccctgaaggaatcatgagtttatcacctttgaggatcctctgggactcttacttaaaatgaatttttggttaaggtagctcataaaactcatctatttgtctttgcaagttgttgaaatgttaaaattggtcttgttcatcaattttttaatagggaacaaatcatgaagagatagttccacagtgtctcagttctgaagaaactaagaacaaagttgtatcctttctggagaaggtactttctttacatggctcatgttttattctttgtcctatttttttttttccgaaattatgtaactgtaaccaacctgagtgtcttcttagcttaaacttttcacagtgctgagcacagtgctgacgacttttactaagcaattgaggccacagaagtaaaacacttggggccaggcgcggcggctcatgcctgtaatcccagcactttgggaggccaaggtgggtggatcatgaggtcaggagttcaagaccagcctggccaacatggggaaaccctgtttctactaaaaatacaaaaattagccgggcatggtggtacgcgcctgcagtcccagctactcgggaggctgaggcaggagaattgcttgaactggggaggtagagattgcagtaagccaagatcatgccactgcactccagcctgagcgacagagtgagactgtctcaaaaaaggacacttgtagttcctctgcctgtagtttggggtgtaatagcactgattatccaggcagtgagatgactaatgaggatccctaagctattaataatcataattaaatacacttgatcacataattaggtaggcctgagaggatgtttactaccatattttgggtataatttaggcatggcttttttttttttttttttttttttttatttgggcagcctcccaagccagggtaagctcagggcccttttttttttttttttttttttttttttggcatggcttttttattctctttgcagccaagacctgtttttacaattaaaaccaaaattttgaatcacaaggttcctatgtctatgcatacttgggaacttagtgtgaggaaataatagttaattgaaatactagtggaactgttaaaccacaaatttagactaccaggagaaactgaattatttgatatattacatgtaatgatgcacgttatatattttacatatattacatatatatttttttaggtgaaatgggcccacttgactcactgaactttattttttagacagagtctcgctctgtcgcccagattggagtgtggtggtgtgatcatagctcgctataacctcaaactcctgggctcaagcattcctcccaccaaagtcctgggattagaggcatgagccaccacacttggcctacttatattacatctaagctggattttaagtacatgtgtatacactgctgttgccagtttcttagcttatacagtaaaggttagcagactatcattttttcctgcaaagacaactctataactaactattttgtaaggaagaacacagtagagtgatttaatccagattatactaagagtatttatagatcagtccatgtgacttccagaatttgcctagtatggttgaacactcagcacttaaattatgtggccatttcatatctagtagagtgctaacatgttgctatttgcttggtttttcatggtccctggcagactgggtttgtagatgaaactgaagctgccaaagtggaacgtgtgaaacaggaaaaaggtattttctgggaaccctttgctaatgtgactgtagaagaagcaaagaggtcatctttacaggtatgggctgatttcaataggggccaaactttaacaaggcaaattctgccctttttacttactgacgaaacaaaccagtgtggtttccagccttatgctgaatttcaaatcaaatagatctagacatgtaaaattctgttttatggtagttgcttttaaaattaagaagtgggactacaccatatcaaatatattctttcagtatgtttgaattattggtagtaacctttaagggaagttacatattgtaccagtgatgctataaatgcagtctttactgaaccacagaagaaaatgaaagaaacttactcctaaatgtttagtttgattccttgccttattaatcaaatgagtctcctaataatttttggcagtaactgaagatcacatctacttattaaaaggcagaatttgacaccaataaggatattcaaaatattgttttgagcactattagtatagtaattagtatagtagtaattcatgaagaacaacattctgataagttttagtcaaactctcataaaaagaaaatacatttatgaacttgtttataagacatgtaagcttggactatgcagcacttctcattgggagccctttgggacaggatacttgttgtataccacatacaaactaagacactggtagtagcactctgaattgctatgataaaccaaaatgcctttacatatttttctagatgactgtgtaggggttttggggtgcatcctcctacccttgtgatccaatgactagaataaaatttgcatgtaagctttactccagtccaaaaggaaggttctttatatttagaatggatattgtgatattacttatgttttttttccagccttatgcaaaaagagctcgtcaggagttcccctgggaagaagagtacaggtcagcgctgcatacaatagcaggggctttggaagcaactgagtcactactccaaaagggtcctgctccagcctggctttcaatggaaatggaggcgctccaagaaaggatggataagctaaaacgttacatacatactctagggtgaaacttatcactaggcagaactgggtttgatgctttgtcaactgaaaatacttatgtctgtacattttctaacagatataaaacaaattttgtaaagttgaatctagtgaaaataatctttatttgacatttagagaacaggattgtggggaatattcttattaagaactttggtacaatgtactacatgtggaacagtcaggaactgcctaggtccacaaagaaccatttactcagatagtctaactgtaaacaaataaataagctgcctaaggaaacctcagcaatttaaaatcatttatataatttatagctaaaattttttaaagttgtatttcataatagagcttactcttatgttaaagaatggcacaaaattaagctaaccagcttgaattacattttctttacttccagaattgtcctggaaaaagcagtaaattcgacctctcctcagctacttgctcttcatagaaactggcctcagtcaaatgcacaaaggctcttcctcctggaaaccagtactgtgagcctcaccacccagggcttttagccagcactcacagtcagtctcctacttcagttggcacagactggataatgagctcctgggatgggaaaagcaggccactttggggttttcttgtcccaaagcctgcttttgaggtattgattttttttaaaaaaagggaatcctttttcctaaagtttaactcacatctattgtcaccagttattatcttcccagttcagctccccttcttcttcccagccttcagcctctccctgcaacaaaataaagcacaccaagaacccactgaaacaaatcatatgcaaaaatcatacgcaaatttgaaaaagcaggaatttaaaatttatcttttgatgccagaaacactacctcgtactaagtaaaataacttagagctctaacagaaagttgaaaagtaggattacaaaaccatggcactggaaaatagcttttcaaaaaccataaaatccagtaaaaatcagtgtggatgacaccaaatccttattttaatcccttttttttctttttcaaataaaaaggttacaatagctcattaaacaaactaagcattgctacatttttctgggggaaggaaagatagataccaatgatagaaactgattttgttaattttgtgcttgacttgactaggaaaatagcatgttgcttgttataaatgggatactgcaactaggacctatgagggaaatcctaaagctagtagcacagtttactccataaaagtactcacctcagtaatttctgctgcagcaaattttgaggaaaactgcatcactggggagacatcatccttttttgggaccatttctgtcctcagttcaggtaatataagaaaagcagcagaaggcttaatttctgggatcatatcagcaaaccaatccatctcaggatcttttactggcttcttttttacttgaatggtgaattcctctcctaaaccaagttctgatggaaccttaaggggcctttcttgtgatgacacttttggcggctcgatttggtctgcgtcatcccccctttgtacaaggctaatcttttggggtaagcttgatttccaaggcatagactcttcagtgagtgaaagcaaagcaggaataggcttctgctcccctgaggtaacaggttttgtagcagtgattccacctcctgggtttactttagtatctaagctgctgggctcgcagtcatcccaagatgactcttccacatccaaggtagtgcactgggacttgacatcatcacaaggttctctaggccaaatctgtatgttgacagtttgattttcaggctcctcaggttcactccagtcaggccactcctcagactttttagaacttgatgggaagttttcactgtcctccgaagtattttttacatctgagagtccatttatgggaaatttaataggctgagaaaatggatcgcctgtagggaaaataattattctcataaaatactggttaaaggtaagaactacacttatgggaaggatagcattaaggaagtgtagtagtataggtctaattacttggaaatatccatgcatactaaacaaaagagatcccagcagaacattactcaagatcaacgatgtcacatgttatccaaataattacataatacttacattattaactcagtggaagcatgtaagtaataactagtgcattcaatccttattaaatatccaaacatacagtatattcacataaatatagaaatgctctaagccaggcagtgttatccttgggatgtttgttaattacatatgcctgaaaaagtcttgcaggctcaaataagtttgcctaactcaacttattaacctcactttaagaaatttccctaagtgtagtagttaaggcactgagagatcctgtgcaatgtgttaatgactttgctctcatttccccaaacttatttaaccacagaactctttttcacaacacgcccattaacatctttcaaaactatcattcttggtacaatttggaagatgctgcactaaggcaacaaaagtctcaaagtaaagtatcagtgcaaaaaagaattcaagtaatgtcaacctgcacttctcaccaactataaagaggaggtaagtatatatccaatagtctggagaaacaagatgagaccaaagctgactacataattacaaataaatcagtctcaaaactcccaaaacacccataagcttattagtctcaggaaaacattcatccaagcaatggaaaagctatataaatttaatatttctacctgtctgtaaaagagtattgtagtaatctcgctgtatgtgcttcttgctgttgatgggcgtgctgccagaaaagaaacatttagggaatatgctagagaaggggttctccaagattggcgagatctgactgtgatggctgcagacgacacacataggagaatctgaaggtaaataaaaactccaaaacatgaaagggacagtaaattgcttcttgatctatcacatggttggtgggcatagttaagtgaaatgggtatatttttatacatataaaggataaaatggaggagagaacatcttcaaacatttgaagacatacacccattatggaatggactgcctgtccctagaggtgtttaagaacaggctgtgtccactccatgtggtgatggatcaaagcattacacagatataacctttgggacacctagctaaaaagttatagcccttcaaaacatgttggtggagatttaaaaccaactgattctacttactttccttttaagaataaaagttgaagagtataagcataagaatatgaatgtagtgaataccacaaaactatacacttaaaagtagttaaaataataaatttaagctgtggacatttaacccccaactggggaaaaaattagtttcaagaaatgtccttaacagtttgccagaaagtttatacttaaaaaaatgggcattggtcaatcaatttttggccaaaaagtgaggatgtggggaatagcctggggtaaactcttaacgattaggtccccagctctcttcagcaccacatctcccccctcctcaccccagcactcaggccaggcctctacaagccctccactcatttgtgccactatcctccttgaagtcctatctaatgccttatccgatgtcttcttctctgaaccatgttctccacctctctttcaggcagacttaatttcctatttccctttcatagctgaaaatgagaccacagcctctacatcacccttttcaagctctttgcagccatgacgctggtttcattagcaccaaggaagaggtgaacgctctttaaaacttcaggaagccaatgttgctttaaaaattcttttagcatcaaaattagagaaaagcctatctgattaactcttttctgctaaatgtctccatgttaccaactatcaatgagaactgggttagagatccagaattacataacaagttcattgtcttactgaaggctacacaaaggagcaatgacattgttgataaaaaattcttgtaagaccagaaattactgctacctcccaggtaacatccactgggaacataccagaaataaggacttcctgcagtatctaaaaggcaacagctttttaccccataggccaacaaaagtcacaagaaacttaaacatctagtgttaataagaattgatgcaacctttttgtaagctgacagtatctactaaatttaaaatatatcctttggcccagcaagtttacttctaacattcagtgtctgcggatgctcaagtctcttaaagaaaatgatgtagtatttaaatataatctatgcatatcatcccataatactttaagtcatttcttggttacttataatacctttattttttggtttcttttctgagtatttttgatccacagttggttaaatctgcaggtgcaaacctgcaaatatgggggaccaactggaaagatacacgtgtaaagatattcattgcagcactgtttgtagggattaaaaatccagaaatggatgcagtatccatgaataaagaaatcactgaatgaattatattcagtgaaatattaggtagctttcaaagagtaagttagacttctatgtattgggagacaggtccctgatatgttgttacttgaaaacaaattatagatttgtgcatggcattttcttaccatttaagcaaaaatcctacacagtcttgtgtcacttaacaatggggacatgttctgagaaatgcatcttagacgattttgtccttgtataaacatagatggtatagcctattaacacctaggctataaactgatacagcatgttactgtactgaatactgtagataattataacacagtggtaattatttgagtgtccaaacatagaaaagtaaaaatataatgatacatggtatacctgtatagggtatttactatgaatggcatttataggactagaagttgctctgagttaccagtgaatgaaggcctaggatattactgtacactaccatacagtttataaacactacacttaggctacactaagtttattaaaaatttttcttcaataatgttatttactataactttataaactttttaatgtttttaactgtttgacttttttgtaataatactatgcttaaaacatattgtacaactgtaccaaaatattttcttatatccttattctgtaagctttttctgtttttaaaattatttacttatttttactttgaaacttttttgttaaaatctaagacacaatcacacacattagcctaggcctacacagggtcaagatcatcaatttcactgtctttgacctccacagcttattccgctggaaggtctgcagggagctgtcatgtcctctgataacaatgccttcttctggaatacctcctgaaggacccctggaggctgtttcacagttaaagttttttctttttaataagcagaaggaatacactaatgattaaaagtaaatatataaaccagttacatagtcatttgttatcattaccaagtattatgtactgcacataattgtatgcactgtacttttatataactggcagcacactaggtttgtttacaccagcatcaccacaaacacatgagtaatgcattccactacagctacaacatcaactgccaatagcaatttttcagctccattataatgtcatgagaccatcatggtatagacagtcagtcatttacgaggtccttcgttaaccaaaatgtccttatgtggtacatgactctctatgcacgtgtaaacatatatctgtgtgtctttttgcaagcttaaaaaaaaagtatgaaaggattcccactgaaaatccccccgagaagttcagaaagagaaattaactttttatttatacttctttatatcatttgactgaatatgaccctcctacattacttatataatactaaaaatctaaaaaaatgacacacaaaaagttagaccttttaataattcttaccttctagagaaaggtcagtatttttagtaaaacttggggcagtgcgtttgaagatcttggttcgttctcctcccacaaccacctctggtccaagcagagagaccagcactgctaggctatgcagagtaattgccacaatggaatcgctagtatcacgcaggcccagcaaaacctaggagcaaatgaggtaataagggttgacaaccacaatacctatctctttcttcccctgtaaatgagcaattgggctgcaaacagattgtgcttagataaactacattatcttagatatgtgttccaggtcagtggctctcaaactacctgtggtaaaagaccagtatcttcccctcccaatccatcacagacttaccatttttaaaaaatacaatcaaaacaaaattaaaaagacatatgttgggtacataaaattactctgtcaaattgcgacaaaaggttttaaatgttaagtcttcatatctgtactcacatcacagaactgtaataaaaagttcatgtactggcagtgttctgcagagcgcactcagaactcatctagggtactaacagttatgttcctgtccatgcttctcttttcagctcttttcaagggtaggaccacctgtcccaaactgagcccatcatgatcttttgtccagtaatataaactagaatttatattttcagtttatataggtttactcaatgaggacagtatgccaggcagggacaagtgcctgtagcccgagctactcagaaggctgaggcatgtggatcacttgagcccaggagttctgggctgtagtgtgctatgctgattgggtgtctgcactaaattcagcatcaatatagtaacctcccaggagctggggactaccaggttgcctaaagaggggtgaaccagcccaggttggaaatggagcaggtcaaactcctgggctgatcggtagtgggttcatgcctgtgaagagccactgcactctagcttgggcaacacagtgagacccccatctctaaaataatttttttttatgaggacagaaaacttggaagttatgggacaaccattttggccatgtgcacaccaaaacaaggaaagctggtcttcagagagtcaaaagtcaaacaaatgcagacagaagaaaggaatgaaaaacatggctgtaagccccagctgcacttgatttccatctaagttagtctaacattcttaaattttttttgctttggctggtttaaaatgagtttcagttacttgcaaccaaaaacaccttagaagacagtcacatgcagatatcaggcaagtactgctctgcatataaggaaggaaatgaccttcaaagcatctgcaccagccagacacaaggccagggtaactggcctgcctactggaagcagcagggcgtgacaggtatcaggaatctttggttttggtcttagctctgctaataattctcaatgtgacttgaccaattggtctttttatttttctggcctggtttcctcatttatatagtaagattaaaggtttccaacaggactcaaaagataattattaggaccaatgctaacagatcactttctgtacatgtaaactaaagcatgtttcttttacatatgattagagttctgcccactgaatatgataatcataaaacagcaatccgcccaagccaaaaattggtcatcctcaacacctcttccatctaatgagaaactgagtactaccccttctgtgtccctctactatatccactgtcacactttccccagcctttgtcatctcttagctaaactattctaacagcttcctagcttatctccctttctgtggtctcttccacactgctaccaaagtgaactttctagcacacacaaattggcccactcttctttaggggaagcagtttcctaagtaatgagaggtttcattgtcttccacatgctcaacatttactctttgacctcagtccaattctgagacctatgatgacaactccatttcagagttaaagtgcttcattcctcttctaaatttccagacacaactacatacagggtaacaattactgctgcagatgtaaatacaaagtgctatgttgtagttactacaacacagagactttaaagtcagcccccagcgaatcacacctccagtatccatgcccttgagtaaacccatcccacaatgagcctgggctttttccaactctaaccgagagaatgaggcaaaaatgactgtcagttcacaacctacactttaagaaggcttcttttgccctttttttttctttagccctggccagccatttaagaagtccacctgccttgctagagaaatcatgtggaaatgtcacatggggggatacaagccccccaagcttcctgaaaattcatggagagaaaggcgcagcctctcagccaccccttccaagataccaaggagccattttggatgtgtcaacccttgtcgggccccagatgactgaagactcagctgatatgtggaacagaaccttcagctgagtccagtcaatccaaagaatcatgagaattaataaaatgattattattttaaggcactaagttttggggtacttacatggcaacggatgactgaaacatgtcccacttatgagctccttgaaagcagagagaatgttaatctatctcataggaaaattatttgaaagacaccatgtgattgtagtcttttaaaacaatttttttaaaacctcatactaggttgaatagtgtccctccaaaattcatgtccatgcagaatgtgacctttagatgaggtcatactgggttagggtaggccataaattcaatgactggtgtctttctaagaggccatgtaaagacagacaaggaggtaagaaggccacgtgacaacagaagcagagactggaatgatacagccacaagccaagaaataccaaggattgctgggagctacgagaagcttgtaaagaggagtccctttcacatcctacagccttcagaggaagcagggtcctgttgacaccctggttttagacttctggcctccagaactaaaaataaatttgtattgctttaagccattataatttgtgataatttgttatggcagcctaagcaactaatacaaacctttcattagtttcactaacaaaaccctttggtgggcaaatcataataaggttccctagtggctgataacaacaggctgaaagccactgataagaatcatctcatgctcctctctgttctaatttaattactttataataattatggataattatatgttatgttcacaaagtgctccatacattattgttattcatttaccctcccaaaattaacaaacaattatagtttctcccaggttaagaccaaatatgtcagtttaatcaatttgcctgtgtgaatggaatggaaatgcaattttaatttcagcactttgtattccacagactgctgcctgaaggctttctaagctattatctgaatacctccaaaactctttctttcagcactcttccctcaggttctgtgactaccccactgcaaacttggcctctgacctgtggcaagatgactttcttcagctgctcctgagtgaagtgctccacgtaggcctcgatgtgagacagcagcaccatccgcacatgctcttcatgaacttcaaacaactggagaagcacggggatcacccgtgactggaacagggctggtgagagcaagcaaggagtttctccctgcgcatgatctacccgaaaaatcaaaggttacagatgaaaaaacaaattttcatttcagtgaaaagtattaagcataattcatacactgaacccaaaactacacatattctaagtactcttctaaattctttttttctttttgagatggagtctcactctgtcacccatgctggagtgcagtggcgcgatctcggctcactgcaacctcctcctcccaggttcaagcaattctcctgcctcagcctcccgagtagctgggattacaggcacccgccaccatgcccggctaatttttgtatttttagtagagatggggtttcaccatgttggccaggctggtctcaaacttctgacctagtgatccacctgcctcggtgtcccaaagtgctgggattacaggcgtgagccaccgcgcccggccagtattcttctaaattctaatgctccaaaccaaagcaaagttcttttcttgaccgaaaattacttaacgcttaattatgttaagtacacttaccttgtagagtttttgaaatactagagatcatagtgtacaacaaagcttgtattttaacagaattctgagtaactttttataaatttatgtttaatcagtgaggaatttcatacactagatttgtgacatactgatattgttgtagttttatttgcaaaaccaggtgttaaatgctacagtgggactttgatgctggatactcctctttttccagtatttatggtagtggttatcaggcaggtatgtattgagaattatttgggaacttttaaaaaatatgtatacctatgtcctggctctctgttctagaaccaatggatcaagcaaagaggcaaattttcaaaaagcaacataggtgattcagaggcacacccctatgtaagacctactgaggaataggatgtaagagctataaagaaaaattcatggctaaagagaatggtatcaaagtagagatataaggaaattctaaactgtaacaatgctttgttggactgagatccctttaagaaaataaattctgaaagcaggattctacgtaacttaaaattctagtgtcatattaatactatattctctcatctgttgttaccatctctagtgctataaaattgtaaaattccaaagcaataacctcatttcacattcgtaaaaaaaacttgaagccccaggaagtaaaatgatctcagtgcttttcactgaaaatagaaaataaatgggttgctcttggtaaggtaggaggcacaggcctaaatgattcatgataaatgtaaaagttctttgaagatgcatgccttaccttaaaacttcaaatgtatatttcagattctagtcagatataacacttactatagtaaattggactctctaggaagatgcttcatttatcctgtgaactctggtacccaggtttgaattaaagttatcacatcaggggccaacaattgttctccgtttttagaaccaaacattaactacaccacacagtaatctcatcctgctcaaatatggactaataatcaccaaacttcttaactagcaataacactttgaaaaagcattcaccttttttggggccaagcagataaggaagaaaactcttaacagccactggctctgcaaacaccaactgattaagcagaagaggcaccaaccttgaagctatcaattcctctgacaagcagctgactctgtccagcagaaatctgaggacaaaaagggaaagcccaggaaactggtcatgacactgtatcagcttacttgtacagtttagcctacacacatcctctctctcacttctatcaaagtgatgcatttgaaatggagatagagaaggtgaacagattggtccccaagtacttaagaaaaatgcgtggctgggtgcagtggctcacacctgtaatcccagcactttgggcggccgcggcgggcagatcacttgaggtcaggagtttgagaccagcttggccaacatggtgaaaccccatctctactaaaagtacaaaaattagccgggcgtggtggcagacgcctgtaatcccagctactcggggctgaggcatgggaggctgaggttcaatcgcttgaagctgggaggcagaggttgcagtgagctgagatcatgtcactgcactccagcctgggtgacagggtgagattctgtctcaaaaaaaaaaaaaaaaatacagaaagtgtgagcaaagccagctagtcagcacacctccaattcacaccaggaaatgtttccaccaaattatccccttactaatagtcaaagtgccctcctttttaccctaagaagacaggctttgtagataataaaagacactttctcaaatttaaacaatgtagaaagcttccataactaacaaaacataggcttttgtcactatccccataaattaaaacaacatatataaaggcactttgttaagaaatacagatattaggtattaatggtaatattactccattatacaatcacccttagcagatatccttgcctcctactttattaggaaacaggtcacatgcattatcaccttcaaacccctacaccgctatcagcaaacaggtttacattgatactcattcccacctcccttctagttattaaggatccgagggcctcctcttacttaaggccacccccatccagccactgccccagcattcccctctcttccaggacaatgcaccaaccatctccccaacttgattgcagcttcaactgctccctccattcttctgctagctcctttccctcgtctattaatatgctcaggtctcttccacccttacaaaatccttccttgaccccatttgcttcttcagtaatattttctctccaagtttttctccagtgtctttctcaccttctgttcacttctcagcccaatgcactctcactgctggaacagctcttgctaagataaagttaccagtgtcttcctaactactaaatgaacaggtacctgttcgttcctcctaccttcgtgaaattccctactcctttgggaatatcatagccttcctagctctctgagtctcctctaacccctgcttctcattcatcagccactccttcccaccagcccccttataaggtcgggtgccccaggattacaatttgggctcactgtccttttcatgctacccactttctctgtgaaaatatcaccaactataggctgataacaccctaatatttccctctagctcatcagcttaagacttctctgaagcttcagacctgtctgttcaacggtccatgtatatctctatctaaagtccaacagatacttcaaaccaacatatccaacactgaagtcataattttccctgcatattaggtcctctcctccaatattctctatttcatttggtgataatcactaaggcttctcagctttatctttttaaatgtttatcttagtgtcttcttcattggagacattaatgcccttatgtgtggcttcatatttactgcctggactaccatagtcactaaccaatccaaatcttaaatgagttaagccttcccactcaatagagaacaaagtgatccacctaaagggacattaatctgtttcacagcctgcttccatctctttgatggcttcaatgcctgaagtcccctatttacaaataacatcagcactcctcactgccacatgcaaggtgtacctcctacctgtccttgtcttggaatttgtcccccagcaggactcaactgtttgcggttcctgcacaagtcacactaggtcttgtctttgtgcatttgttcatgttgcccctctgcctagaataccttttctctaacgacctcctcctgccctgtgtgttctcaggactccttccaaaagctctactgtacccacctctctgtttaaggattatcagtctgggtatctatttctttcaccagaaatatctaccccaccagggcctagcagaaagcctgacacataggaaatgttcaataaatgtgaaataaaccaaatatatgactcatcttctctagaatacctaaagtgattatatggacttaatccaagttattcaatttaaattcttaattttctgaacttacttaaagaattccgttttctcctcttcactcttcaatgttaaacttttcaagaaattcacaacttccagaaaatcatttctaaatgccaaaaagagaaggaattcagcagaacagattagagaatgttaaatattgaggtcataatcacagactacatcaatataattttcaaccaagaaacattctcctttgccatttaaagattctattacaactaagtagcttatgagacaaatactatggaacacgcctctgaaatctaatattttaatagcaaagagatctgtgacgaggatacaagtttaaacacacatatgctaacatgctttatggtttagtcagaaaaatcctccaaactgttggttgtaataggatgttaaatgaagtatcctgggagaaatgacattaccattacaaaatattgctgactctcaagtctcctttgatgaaataaaaactattaaagagattgtggaaagtggaatttccatacagcaatcttctcatttctcctgctgtaagttacttggtcattctttcagccaggcagggattagtgtgagaggagtggtcggtttcctacagggctgccagagaattccaaaggctgtgcactgctcagctcacaccctactgtatatgagactgttgaccccagatgctccggcatacaagctggacagcctattgggaggcccagtaagcagagataccacttggatcttcacatcttatgtttatacctactttaggcttccccctggttcagcagcaaagatgtctaaacttaaatctaatcaatcaaattggttcagctgcctctgtaagagatgctgaccctggctcctactgttgtctcttaactggggtttctccccacattaacagtgggattttggcaggtacggtttgtgtgttttcagttttcctctcccctctcaatttacaatacaactcttaataaataactcattttacacagagtgatgagagaatctatttaccataagggattgttctttgtagagactttctatcaagggaaataaaatatttctaagaatcatccaaaagggcatagaagtactttggaaagactctcataatgataaatataaaatttgtatttgtcaattaaaaatacaaatttttaaaaacatcctcaaaaaagacgatcataatgggaaagttttgaatagtttgaaatatgacaatataagcccagtaaccataaatgctacttatttaataagattacccttccccacctacccctagttctatcctagaggtaattttccccacttgggaataatactagccttccctttgctctggtttttctcaagctctaaatgcaaacacataggatttttagttttaaaactaacataaggttggctttgctaatagaagtcatgaatatggaactaacctgtgcagaagttctgcagtcatggaaataaaaaaatgaaggacacataattaaaactaaccttgaagaagggttcaaaaatatctctgaatctaataaggtattaaattatattgtgcccttgcctctaaaccaacttatttgctcttccatcacatattactagacaaagaatatgaactcattccccatccccatgagaaaaactgaataataataaactcataatataatggcagcagaaaagaaaggctaggtttagtaactttttcaattaacttacaactgtaaaccagtggacacacctagcttcttcactattagaagccctaataaatctggctacagtttctaaatccaagccttcaagacaatcaaggatttctaaaacttcctatctataataggaaactgacagacaacccaatttcttcctctattttctcctgtggacatgattcaatctctcctaataattaacaacagaaactgcatcatttggtcctccaaaaaccccccactgccacttatccaaggcacaagagcaggcagcagtgttccggaagcagctggcgtcaccacaccagatgccctcacctgaagaagtcatgagatagtaaggtgcagagcgctggccgacattttggaatgggattcagcaaagttgagtgcaaggtctgttgaaagctggagagaacatccgctgaaactgaaatccagagctacagttagtttccaatgccttctccctcttttcaggacctctatagctggagactgccgagagcaaaaaccaacctgtaaaagcccaaacaaacaaagccctggctgttgctaaacagcttcctgcttgccttaggcaaaactcattggcaggtgtagaaagttgtcctgccaccaccatcaaaccccaccccaggtgccattcccttctataccctctcatttcctgattatccatttaacccagctcaggcccaaagaagaagggctaacagtgataggtttgagggtctttctcaacaggggttcctcatccacagaacagttatatgaatgattatatttacaattcttccaaggatagtaaataattgctaccattctaaatacatagaatagttagttcattatacacaatggatgcctttgggccttaggatttaattctcaagtatttaggatgggacaatttagagctgacagctgaatcagaacactgcataagcctggcagaataaaccgcattagaactggcacaaagcttgagccatgtgagatgtaggccaataaggggcctactgtgacacatgcctcagtaaactcaatgagtggaaaattaaagtcctaaagtgggcacaggagagtgaagcaggctgccaagcatgcagttagagaacacagaagagaggagaaaacaatgtctttagcagcctgagctttaagaggcaatgaaagaaaaaagtgaagagtaaattaataggaaaataaatcaaatgagctttgaaagaataaagaaatgttgagctcaatttaacaaaaaattatgaattttaccctattattcagattattacatataaatcattaatgatagttatgtacttattggccggttcaataaggaatagagtctacatttagaccgcttaagtactattaccaattaataaggtaatcacacatgatactgacagccatagttcaaagtgcttcctacttaaaattcttttcaccatgcaaactaatgaaacccaaagcttctttccttactgttcttagtatctgccctaaaaaagttacctggtaagcaaaagattccttactgtgctcaaagactgtagtcctttgaattccacacagaatacgtcatggatgattttcctacttattctatagatgcagtagtataactccaactcaccctgttcatttaagattgtgagcaaactttccaccaatgttccaaatgaaaaggcatcccgggcatgtccatgacactctgggagagttgtgaattctggagactaaaagcagtgaagacaattaaaactagaggatctgccttataagccatttctaattttctctgaagcaccttctcccatgtttgtatttattatactcaaatctatcttcagaccaccacacatgaatgtatagattcttaacactattagtgaatagaatttgttgaagattgtaaaacattaaaatgagcaaaaatttttaaaaaggttagaatatggcacatgtcggtggcttttacaaatattttcacagcaatccatggtaaagaatatgtcttatatcatgctctactatacatacacgtgcataaatacacacataatggaaacaaaagtttcataaaacagtgcttagccttactatctaagatgcccaaagacatgttcttttattctttttttttttataaaatgctagtcaggaccccctaaattgacttaaaacccgcaaatcaccgattttaaaaacactagtatatatacataatactgatttggataaatctgatttatttcaagtcttaggtctatacttaagtttatagttgagttcatatttcctgtaaagcacactaaatatatctttggggattatttatagtggctataagaacaaatttatagaaggagcatctgcttttgaatttattggtaaatagaatttttctttaccagcactcttaataatcattcttctgtgcatcttgaaatcctaagtaatgggcagctagagatagatgaatggtttgggtgacatacaagaaaggactagggtttttgcttccataattattatggattccagcaaagtgcaactactgataatggtttcactgttttcccacccaaatctcatcttgaattataactcccacaattcccacgtgtcctgggaagaaccagtggcaggtgactgaattatggggggcaggtctttcctgccctgttctcatgatagtgaatgggcctcacaagatctgatggctttaaaaaaggggagtttccctgcataagctctcttctcttgtctgccaccaggtgagacgtgccttttgccttctgccatgattttaaggaactccccagccacgtggaacttttgtaaattgcccagtcttgggtatgtcttcatcagcagcgtgaaaacagagtaatacagtaaattggtaccagtagagtggggcgttgctgaaaagatacctgaaaatatggaagggactttggaactgggtaactggcaaaggctggaacagtttggagggttcagaagaagacaggaaaatgtgggaaagtttggaatttcctagagacttgttgaatggctttgacaaaaatgctgctagtgatatgaacaataaggtccaggctgaggtggtctcagatggagatgaggaacttgttgggaactggggcaaaggtgactcttgttatgttttagcagagactggtggcattttgcccctgccctaaagaactgtggaactttgaacttaagagaggatttagggtatctggcggaagaaatttctaagcagcagagcattcaagaggtgacttgggtgctgttaaaggcattcagttttaaaaggaaaacagagcataaaagcttgggaagtttgcagcctgacaatgcaatagaaaagaaaatctcaggtgacattcaaggcagctgcagaagtttgcataagtaatgaggggccaaatgttaatccccaagaaaatggggaaaatgtctccagggcatgtcagagatcttcatggcagcccctcccatcacaggcctgcaggcctaggaggaaaaagtggtttcatgggcgaggcccagggtccccatgctgtgtgaagcctagggacttggtgccctgcatctcagccgctctagccatggcagaaaggggccaacgtagagctcagcatgtggcttcagagggtgcaagccccaagccttggcagcttcacatggtgttgagcctgcaagtgcacattagtcaagaactggggtttgggaacctccacctagatttcagaagatgtatggaaatgcctggatgcccaggcagaatttgctgcatgggcagggcccttatggagaacctctactagggcagtgtgaaaaggaaatgtgaggtcggtgcccccacacagagttcctactggagcactgcctaatggagctgtgagaaggaggccagcatcctccagatcccagaatggtagatccactgacagcttgcaccacgtgcctggaaaagctgcagacattcaagaccagcctgtgaaagcagccaggagggaaactgtaccctgcagagccacaggggtagaagctgcccaagaccatgggaacccaccgcttgcatcagcgtgacccggatgcgagacacggaatcaaaggagatcattttggagctttaagatttgactgcctcactggatttcacacttgcctgtagcccctttgtttagctaatttctcccatttggaatggccgtatttacccaatgcctgtacccccattgtatctaggaagtaactaacttgcttctgattttacaggctcataggtggaagggacttgcctcatctcagatgagacattggactatggacttttgagttaatgctgaaatgagtgaagactttgggggactgttgagaagacatgactggttttgaaatgtgaggacatgagactggggaggggccaggggaggaatgatgtggtttggctgtgactctcatcttggattgtaactcccacaattcccatgtgtcatgggcaggaattcagtgggaggtgattgaattatggaggtagatctctcctgtgctgttctggtaatagtgagtaggtctcacaagacctgatggttttataaaagggaattttcctgcacaagctctcttctcttgtctgctgccatgtgagaagtgcctttcaccttccgccatgattgtgaggcctccccagccacatggaactgttagtccaataaacctctttcttttgtaaattgcccagtcgcaggtatgtctttatcagcagcatgaaaacagactaatacaactacttatcgtgaaatgggtataattgtctgttcacactgaggtatctctacctctaaacaatatcataggtgtttatgtgacaaaaaaatttaagctggctccctggctgtggtgataagattaatcttagaaagctttaaggccagaggaattatgaggcatctataactcagtaaagaaaggagtaagcagaggaaagttttttaaaatttcatactcaattacacaaaggcaccttcattatatgtgaagtatatcatcttaccatctcttcaggagggatagatgctgggtctcttattgactgaatactcctcagaaactagacagagaaataaattaaagaaaatgattcatacatatgtttggtgaactaatctcttacatcaggttacataagcaatgagcaatgcaaacagcaccaattaaaccttcaaatcaatgccgcatattagatgcacaaatttaaaatgcttctaattttaaaaatgcaaataaagtacctggcacagcacaaggcacagtaataaatggtagttccttttcctctccccttcatctggtttaacagacacgctctgctgttcagaggcatctgtgcatctgatttccttatatggaaattagaacacttctttcttttcctgcttagatattaacaataagaaggcttttctagcacagaacaaatctgtcattaatctcactaaaccaaatgaatcttaagtcttgctaccacacgagattagaaagttgagaaccttagttatggagacaaaaccaacatccacagaataagcatattaatttgctagtttcgaagactatttttgaagagcctatatgtcccgaacatcatttaggacactaggaatacaagatgaatgcaataaagtttctgcccccaatcaggtgctcataacctagaatgtaaactaagaatctccataaacgtgctaagtgccctggaagcactggggtgactaattttgttgggcaggggaatgcctaggggaaggagtcacagaaaggagattaaagccagatcttagatgagttcacattttccagaagccaatgggaagaaatgcattccagcaacagaatggcctacaaagaagaagagtgtgaaggaagaaggcatatgtgggaacacagctgaactgcatggaacaagatgtaaccagactatagctcaagaactcttgagtgaggccaggctcggtggctcatatctgtaatcccagcactttgggaggctaaggtgggcagataacctgaggtcaggaatttgagaccagccttggcaacacagcaaaatcccatctctaccaaaaatataaaaaattaaccaggtgtggtggtgtgcacctgtggtcccagctactcaggaggctgaggtgggaagatcacttgaaccagggaggcagaggttgcagtaagccgagatcgcaccactgcactccagcctgggtgacagagagaaattccgtttcccagcactccccagaaaaacctaaatggtaaatgaggctgaaggtaggctgcagaaagattgtgaagggccttatatcccatggcaaagaatttggaataaacagcacagaaaggattacatgctatatacaaagtacacaaaaggtaaattcagggaagaaagagatcaatatggacagaataaccagaaagatgtctttgtggtagaacatctgaactgagcaagaacccatgaaggtacacgttagacatggcccaagttaagtgtggaagcagcacaaaaaagaataggggaaattaagctgaaacagtaagtcaacagtgagccaccatttccgtagggatattaagatggaaatggtttttattttttccttaagaaagagtgaatgcagcagcaacacgcaaaatgtgaaaagaacacacaaaacagaaaacagaaaggttcatcaacctgggagggaaacatgcagaactctcagacaaaagtataaggaatactacatcagcaacaacacagtccactaggagttaagatgcacaggtcctaaatcccgctactaagataccatgtatgaaattgggcaactcggacaattgttcaaagaacattttctgaatacctagtatgtgccaggcactattctaggtagaggtataaagataagagactcacacccttaagagcccaaccaatggaatacaagacagatacataaaggtaatttcactatcaagtggtatgatccaagtaagtacaaggtactatggggcagagaggaggggcatttaactcaaatatctgaacgaaacattttacctctctccgtctcaggtttccctatttataaaataaggagaaaggatacatgacccccactgcctctgaggaacaaaatgctataattctataaatgagggcactgacaaaaaattcaagtctccaaatctaagaccaagctaacactgaaggaaagtgcctaggcaagaaccacataccaagacgctattaaaaaccaagtaaggaaggggggctgtcccctggcttacctctggtgtggcctgagaaactttacaaacagtttccattcctcctagcttccagtgtccatcttcactcacaaacacagatgataaacagacattattgtgtgttaggtgtccctggaaaaaaaaaagaacagaaggaagagtgccactccaggatctgaaatagaaatttacttcaaaagatgtttttctccatctctcacaatctttattttaaaaaactaaatactaatcaccaaaaaaattatgacaagccttcccacttgtggcataataaatggaactataactttaagaaacaacaaattgaatgaagttagataaaaagaaaaatggaatggaagggcttctgttatctccccctgcctcatgtggcaggttaataaacacattaaagccagtgcacacagtcatctcccgatttctatgggagtcaggggatatacatgttcttaaacatacatttacaagtctgtataatctatattatttgcttccaatgcctttaaagataaaatatatctttgctcacataggttattttatttattttcttctctaaattctttctcacccacattctatcacgaacccagatctacttcatctgaaatcttgttagtaggcattaaaaaaattctgcctgaagaagaggaaaatggaatgataaggaccaccagaaatatcccacagactggccaggtgcagtggctcacgcctgtaatcccagcactttgggaggtcgaggcaggcagatcatgaggtcaggagatcgagaccatcctggttaacacggtgaaaccgcgtctctacgaaaaatacaaaatattagccgggcatggtggcgggcgcctgtagtcccagctactcgggaggctgagacaggagaatggcgtgaacccgggaggtggagcttgcagtgagccgagatcacaccactgcactccagcctaggcgacagagtgagaccttgtctcaaataaaaaaaaaaaaaaaaaaaaaaaaaaaaaagaaatatcccacagaccacaaaagagcccattttaaaactgtaaaaatagtacagtcaaataagtaaaagaaagggagaaaataagaacaggattcaggtatttaagtttttttccccaaaccaaaaatcatttcagtgataaaaaagtatgtttaaagttattatgtatgtatgtaatgtatgtatttattacagggtctctgttgccccagctggagtacagtggtgtgatcacagctcactgcagccttgacctcctgggctcaagcaatcctcccacctcagtctccggtgtagggggactacaggcatgtgccaccatggctggctcattttttgaaatgtttttgtagagatagggtcttgccatgttgcccaggctggtctcaaactcctgggctcaagcgatcctcttgccttggcctcccaaagtgctgggattacaggtgtgagccactgcgcctggccaaaagagcactttaaatattctacccaatacatcaaatgtgtaaatatttttatagagaatactccaaaagataaatattttttaaaggaaggtttagaatagtgtgtatagtatatctccatttgagaaaaaaatgaaagagaagaagtatacacactagatatttgttttatatgcacaaagaacatctctggaataatacacgagttaccaccattgcctctgaagagaggaattagggcactggattcaaggatgggagagggacacctcacccacatactgtacaaactttttaaccatgtgtatgcacttttgtcaacaaagaagatatttctccccactgaaccactaataattctcgttatcatgcgaacttgtaaatgcacttttaagagactataaatccaacatgatatttggagaatctgtctccaattaattgaaaaaaatttaaaaacatacataaagatgagtcaagtccaagtgtttctaacctgtgactagtattttttaatcttggtggactgccaaagaccttaatgcctcagaatgcaaataccattaagaaaacagtaatactgtcaagaaacagaccagaagtaaacctaggaaccatcttctagtaatagcaaatatcatcagagagccaagcacactggttacaccacagaatgttaagaggctgtctctcaattggccccaactactcaaatgggaaaggaaaggatatgtatgtattctgcctcttcctaagaaatggtcatttctttcttcaaaatctaaaatgggacacaactcctgaaaacaaataggaactttggtctatggcagcactgacattacaccttttctttgttttagtaactcatgccagctgtagctatgtttaggcaaagaattatccaaaactagagacagactatagtaaactaaaataaaattctataagtaactgtccagggacacagaactagttgtccattctataaaacctctatctatagcacctcttgtgccttccaacatgctatttttcctcaggaagttttctaataataacacttaacttacaatttctatgaacaccataatttataagtattaccacacacatcaccctcccacccccatctacatcaaagtctgtgatgcagactatacaggttacttactctgtcatgaaggaagataagagccagcaatatgtcatagatcccagcacagacctctgcagaagacaatgtttccaaagccacttccaggggctgtactcgctcagtgacaagatgaatgccatccgcttccacagtacaagataaaaatcttagcaagcaagggtgacgaagtgtcttcaaatgctttaaaaatacaaaccgaagagctgaagttaatgaccccaaaccagattatagtttcatatacattatgggggaaatcagaaaatgtatacttgcagttaaggctcttttgagctccctaccttcctccctacccactatatttcacataaggcaaagatctattacttgttctgacatcattcaatttactaatatttaaatggctctacagaaatttccagttccatcattgtagtgtaagcctcataagagcccagatccctcaacgattactgctataaactgaacaaagtgccagaaacaactgaaatcctgacaagtaagcaaatgcaaacagattatggaggggagtcaaacctgaagaagcgacacccatggggtaagtttcttggtttggggaaattttccccttctcacagctatgcatggtgacaggccccagttgcaaagcagtgtaacaaaggtgctaaaagtccagtaaaaactttaccatctttctggctgaaagaacgatagaaaagaaccaaggaaggtgagtatgaggagggtatcccagagaggagagagctggagagatgtcctgatttttcacatacccacaaattctcagaagcaagcatccactggatagacccaaaccagcagagcaaagttttgagaaacagacaggttgcaaataccattcacaggaagagtaagaggaactagttcaaaaacatgaggcctgaacctaaattagctgcctgctaaataaaaaacatcagcattttccaaaggattataacagagcaaagagttatgtgacatcgtattcaaaatgtccaggatgcaaccccaaactactcaacatacaaagaaccacaaaaatgtaacacattctcaatggaaaagacaaccaacaaacaccactccaaggggcctcagatattagaattaccagaaagaatttaaagcagctattgtaatcatcctcctagagataaaggaaaagttataaaataaatagaaaaatttaaatttccaaaagaaaaataaaagattgaaaatcaaaaattaatgtatagactcattaacagaatgaatatgacagaatacagagtcagtaaacttgaaaatattaaccaatctgaagaataaaaaatgttttaaaaaatgatcagaggggccaggtttggggactcacacctgtaatcccagcactttgggaggccaatgcaggaggatcacttcagcccaggagttcaagaccagcctgggcaacacagtgaaatctccatctcataaagaaaaattaagaaagaaaaaaaagagaccagagcctcagacacctgtgacaataacaaaaggtcaaataaatataactgaagtcccaaaaagagaaaagaaaaaaattggggcataaaaaatacaatggatgaaaatttttaaatggatgaaaatacttaaagtatttagccaaatttaaattttacagacttgaagaatttcagtgaatataaaacaagataaattttttaaaaagcacacttaaacatattaccatcaaactgctaaatatcaaagataaaaaaatcttagaagcagctaaaggaaacacattacatggaggagaatgatgatttaaacaactgcagacttctcatcaggaaaggtggagggcaagaaacaatgaaacatgtttaaaatgctgaaagaaaaaactatcagcttggaatactgtatctaagcaaaagtaaccttcagaggaaaaggcaaaataaaagcacttttggtgacaaaaaaaaaaacagaaaatttcttgccagaagacctgctatataaaaaatgctcatgaagttcttcaaatggaagaaaaaatgataccaaagggaaacttggatcttcaggaatgatggaacagcatcagaaacagtaaatattacaataaatatgaaggccactttttttttttttttttgagacggggtctcactctatctcctaggttggagtgcagtggcgcaatctcagctgactgcaacctccgcctcccgggttcaagtgattcccctgcctcagcctcccgagtagctgggactacaggcttgcaccaccatgcccaggtaatttttgtatttttagtagagacagggtttcaccatgttggccaggctgctctcgaattcctgacctcgggcaatccgcccacctcagcctccccaagtgtcgggattacaggcgtgagccaccgtgcccaggtgaaggccacatatttacctcttcagttatttaatcgctatttaaagcagatattgtaatacttcctggtgaggttttcaatgtgtgtgaatgaatgtacaattaatatgtaacaaagaatggtagggataggaggctgaagatacctacattacaaggcttctacgttttatgtgacatagtacaatattaaccacagtagactattttttgccctatttatttttaattttcttaaattaaaaaaattgataatatgcatattttgggggagtacctgtgattttaatactttcgtaaaatttgtaaagatcaaatcaatgtaattgggatatccatcaccttaaacatttgtcttttctttatgctagaaacattagaattagtctcttctagttatgtaaaaatatacaatcgattactgtaaactagtcatcctactgacctatcaaacactagatcttatatcttctatcttgtatcttctaactgcatatttgtacccattaatcaacctctcttcatcccctacaatcccctacccttcctggcctctggtaaccaccagtctactctcaactggtatgagatcaacttttttagattccacatgagtgagatcttgtggtgtgtgtctttctgtgcctcatttacatcacttaacacagcggtccccaacctttttgacaccagggaccagtttcatgaacacaattttttcatggaccaggggtggggggattatttcgggatgagactgttctacctcaaatcatcaggcattagttagattgccataagtgcacaacctagatctcttgcatacacagttcacaatagggttcctgctcctatgagaatctaatactgagaggtgacagcgtgctggcagtcctcacagccctcgctcgctctcggcgcctcctctacctgggtttccactttgacggcacttgaggagcccttcagcccaccacagcactgtgggagcccccttctgggctggccaaggccggagccggttccctcagcttgcagggaggtgtgaagggagaggtgcgagcgggaactggggctgcccacgcagcttgtgggccagctggagttctgggtgggcgtgggcttggcaggccccccacttggagcagccggcaggccctgccacccggggcaatgaggtgcttagcacctgggacagtggctgcggagggtgtactgggtcccccagcagtgccagcccaccggtgctgcactcattttctcgccgggccttagctgccttcccacggggcagggctcaggacctgcagcatgccatgcctgagcctcccacccctccctgggctcctgtgcgaccccagcctccctgaccagcgccgccccctgctccacggagcccagtcccatcgaccacccaaagggctgaggagtgcgggcacatggcgtgggactggcaggcagctccacctgcagccccagtgcgggatccactgggtgaagccagctgggctcctgagtctggtggggacgtggggaacctttgtgtctagctcagggactgtaaatacaccagtcagcactctgtatctagctcaaggtttgcaaacacaccaatcagcgccctgtgtctagctcaaggtttgtgaatgcaccaatccacactctgtatctagctactctggtggggacttggagaacctttgtgtccacactctgtatctagctaatctggtggggaggtggagaacctttgtgtctagctcagggattgtaaacgcacaaatcagcgccctgtcaaaacagaccactgggctctaccagtcagcaggatgtgggtcgggccggataagagaataaaagcaggctgcccagccagcagtggcaaccctctcaggtccgcttccacattgtggaagctttgtcctttcgctctttgcaataaatcttgttgctgctcactctttgggtccacactgcctttatgagctgtaacactcaccgcgaaggtccacggcttcactcctgagccagcgagaccacgaaccccaccagaaggaagaaactccgaacatgagaaggaacaaactccagacacgccacctttaagaactgtaacactcaccgcgagggtccgcggcttcattcttgaagtcagtgagaccaagaacccaccaattccggacacaatactgctgctgatctgacaggagacagaactcagatggtaatgctcgcgtgcccactgcccacagcctcctgctgtgccatcctgttcctagaggccacgaaccagtaccagtctgcagcctaggggttggggacacctgacttaacataatgtcctctaggtcctaacatgatattaaagctctagggtctaccctatacaatcactgaggaagccctgtccaatcagattgggaggagagtgatgaaatatttcatttggaagataaccctcaatatattaccaggtggcattttcataaataagcagtgaatactgaacaccttcttggaggactatgggctagcataagaatccataccctgcattggtataatttttgtatcagatgcctcaaactttattaaactacttccaggcagggtcataggaaaatcttctcagtgggttggtttctccaattacattttttttttttttttttttttgagacagagtctcgctatgtcacccaggctgcattgcagtggcacaatcttggctcactgcaacctccgcctcccaggttcaaccaattctcctgcctcagcctcccaagtagctgggactacaggcgcccgctaccacacccagctaattgtttttgtatttttagtagagatggggtttcactatgttggccaggctggtcttgaactcctgaccttgtgatccacccacctcggcttcccaaagtgctgggattacaggtgtgagccactgtgcccagcctccaatttcttttattttcttataataatctcaaattttgccaactctgggaatagctccaatagggtttatttatttattcttaggaagaaagttgttaccctcgagttaattcaataaaaaataattaagaaaatattgaagaaaaaatttctttaactagcaattacaaactaataaatacagcaaagatccagataaaccaaaaattgtgttagcaggttggttaaatgagtgcagttaactgggaataattttttacaagtgtttttttatttcgttttgttttgtttttgagacagagtgtcgctcttgttacccaggctggagtgcaatggcgtgttctcagctcactgcaaccttcgcctcccaggttcaaatgattcgtctgcctcaacctctcgaatagctgggattacaggcgcccaccaccatgcctggctaatttttgtgtttttagtagagatggggtttcaccatgttggccaggctggtctcaaactcctgacctcaggtgatccacctacctcggcctcccaaagtgctggacttataggcatgagccaccttgcctggcctacaggtgtgttttgagctacggtttctgtataaaattatgtagcctccctcatattttcatttaagaatcatttcaaataattttcaaaccaaatctttcatgttctcttctgcttattgttttactctacaatgcctagaaattttcttgatgcaaagtgagtacttgtttgtttaataaagaaggagaagaagaaatgactcattacatgtttctgaacaaggcacttaacttagcaagaaccttatttctcactctcctttggtacatttaatattaagcataaattatgcacacagattcacaggaaaggctagcagttcagaatcaaataggacattttttgattcaagcctctgctgctctaaagaatagcaacaagacatacttgctaagggtaactaggatatttttcaatgaacatcagttgagcaaataaatggctcttgccctagtagagaaagatgactatttttgaatgagtgtcttgaaagcactttccccaaagttattgaatacctattacatcccatttactgtcctaggtgatggtctctgaaagagggttctgagtaaggacctttattgttaaatatgaatagtattatataatttatcaatgatgatatttttctacacccaaacagggatcttaagtatgagattctttccctaaatataaatgattcccctttatcaggaatcagttatgattcagctatccagagaattcattcaagcctcagaggcttaactttttattgttgttctgcctctgattcgctatttcactttgagaactatgcaaagttaactgactcagcattacagcccaaatccacctgcaggcttttagatgagacaaagccataatttcacgctgttaaatatgttaagtaaacaaaataaccaagatgcctaaactagagaacaaagatcttcagggaaaaatattattcctttttctctgaagatgtaaatctaagacaaaatgcagatgcttttttttttgtaaatgtccactatctgaaggttagatcataaactaacaataaaatgcagaaagagaaaggaataaaaattccattctgtagagcttgcatttgaggtactgataaaacttttaggtggaaatgttcaataggtaagtgaaaatatagatctggagctcagactagagattttggcagataattagtttagaatggcaggttggatggttattaacatccaaggaaaaaggagagcgtgaagtctgcaaggtgtggtggggagcaagtagctggccattccatctggtgggtccatcatacctgaggcatgggggatacttctgaagttcttctgagtggatagtgcccagaagccacgtaagagcactggattctgattatgaagggcaaaaaataatttcttaaaaagtcaaccatgggccaggtacggtggctcatgcctgtaatcccagcactttgagaggctgaggaaggcggatcacgaggtcgagaggtagaggctatcctggccaacatggtgaaaccccacctctactaaaaattcaaaaatgagctgggtgtgtcggcgcgtgcctgtaatcccagctacgtgggatgctgaggcaggagaatcacttcaacccgggaggcagaggttgcagtgagccaagatcgaaccactgcactctagcctgggaaacagagtgagactacatctcaaaaaaaaaagtcagtatgagagaggagaacagctttctccaattagaatgcaagctcttttgggcatagccatcatctcttccatttcttgttatgcccacacaatgtgcattcttaaataacattgactaacccttccacaacagcccaaattcattatggggaagagcataatgactccaacaatactaaatagagcacttatatagcatctacataccactcttagagtccaatgtgattcctggcataaagacactcaagaatcatttttataagctttaataagcttaccacaaagccctaactaaacacttagattacagcaaactacagcaaccaaattcgggcttagaatttatcactgtttataggcttacatatatgagtcatcatcatcagttagcaaattatactgttaattatagctgatgaattcaatgtaaaatgagatggtcagatagaactaagtatttctcacattattttgtggccagagcttatacctgcatttcatcttggtgtatactaggattgttgttttttacttgtaacagtgaagaaagtgtatattgttatccagtaacagaaaacactatatatctgcttgaaataatcgttaaaactaccaaaggtgtgaccaacaacccaaactctagagaaagtgaggcaagctaaatatattgttttagtatttcagatacctaggacatcaaattcctaaaatctagcacatcgaatgccatacatttctcaagtgctatgacctagttttttaagattatgagaaacattctgagaatctaaagttatcactttgttgcaatttcaaatttcccaaattcatatatgaggttttcaaagccacagaatggcttaacaagagacaaagatgaactatgtgcaaagactcagacatggcttaaaagggtatctatgaatattaagggggaataagtcttccctctcaagcttcgcaattccttcagcacagaagtcctcaaaaatggagagtggtcttgctgttttttcctttaaaaactcgatctaggttattcaattttcttggtacgtgcaccataaagtgtaacacaattttaaaaaaatcttataaagaaaaaaatactaagaaagataagtctctagtacctcgccgataatagtttattaaaaaaaatgcacaatcttattagatgaaaataacaggaggcatgttagacattaactgtaagaacaagaaagcgaagtaaggcattttgtcttttgtaaaatcacaataaaaaattcttaacaatacctagatgatgtaaaaaaagagtcaaaaatgtggttctaccaaaaagcaaaattacctagcaagaaaacagccagctatatactttttaccaccacgcatctcgagagaactgttacccatctttttctttaggaaccatcttataacaatttcatgcttgatcaaaaatacaacatcaaataaattactgttgtgaagaccaaaattccattactaatataatcctttataatcattttaaaaaaataaaaacaatttagagtcctatgaaacagacatcaatgttccatacctgttgataactaagggactcaaggtaatagagattataattctaacaaaatcaagatatcaagttcaacttgaaaatagcatgcctaccagaataaacactggagaattaatttactaatacaattacattttccattttagaagatgatatatctgaattcctaaatttccaaagtgctagctatccaaagaagcatcaactaatgccttcattttccctaattcaaaaagacacttggggttattttattgacttacattccacagtaaaatcattttttctgataagaggccaggatctcctgagtgtgtcagacagcatgctaatgcactggcaccctctgcctggagcaacaattataaggcatgaactacaaggatcttttccctaaggaggaagctgaagcctccagaatgatgtcaatacttaactgcattttgctagacgagattaactccttatatagctccttatatcttatattagctacataaaaatgtctccctaactttctcaccagaaaaataaaatatgatgataaaagccattgtactgagttttatgatgttttttggctacaggtatggtacctgaccatgtcatgcaaatggaagataggcccatgaagtaagagcaatgttttgaaaggacataaataaaatactggtccttatgatcttacctcctttgaactttactaatttcatatttttttaaaagaaaacaagatagtaaaaagtactaactattaagtcgtcacctattatggtaccttggcagctttattaaccttgtcttcattttctctcttatacacaaaaactgaagcaaatttgccatcttgcagtacagcgggataaacagcaagtccagagggtaaggtaaatggtggttctctcagtgtatagctctttaaagcactgttctctgatcccatcccttatgcagtgaggcagtactgccactcttcctcaaagccaagcagatctaaaagaaaacagaaaacaatttcaaacattaaatccctatctgcaacatcaacaagagatatccagacatagccaccccaaactactagtttctttgatcctcataactaggacatttgacagtaaaaatggtaaacgctctgcaagttaccagcaatggttgttaattaacaactaacagctctagagaaaatgcacattactaaatagtcacaggtagttactgtccctccccaaactccaccacatacaaactttcagagtggaaaggcaatcaaaaatagaataaggtaattcatacttcctaactcacttgtatatcctcactcacaaaggaaaatgttgtaaaaatattactcaaaaacaataaaacttctgtatgtagaaaataacttaaaattataaaggaaaacaatacaaattggagaatacttataatgaggaaaatcatggttttaatattaatatgttgaaaaacattgttaatatgatgaaaaacatattaacaaatgaagagctcatataaaccaagtaaaacactaaaacaccagtacaataatgggaaagaaaacagacaactcattgaagaaacacaaatgacgataaacataagaaaaagtacgatcgcactactcttcaaagctatcctaagtaaaaaggggaaaccgcaaaactgaatctcaaataatctcaattgctaaaaaaaaacaaaagcccacacatacacagaattcaaatgcaactatgacaaaatacttcagtgctcacctagtgaaggggcacagttagagggatcaagggagaggaaaggattatcatgatgtatgaggaacttttgggaggatggatatattcattatcttgatgatgatgatggtaacgggtgattatgtcaaaacataaaactgtacacttttttcatttattctgtatcaattacgcctcaaagttgttttgaaaagaaatatatgtatacatacacacagacttgaaaaatatatgttgaagtattaacagaggtttccagtggaaggtcagattataggtaattttatacacacacacttgcctgcaccttccaaatcttctacaatatgaacagctttcttgacaacagggatacaaactcacagggtgacaacaggtaatgtgcagtgccccagcagtactggcagcctggcagagggacctactgtgcgtgcatgggacctactgtgagaggcttgcattctgaagacagtggctatcacagagttccaaccaggactgcagtttcagaactgtcagatcatgccacttatcgtgaggaaccaagagcctgaatagttttgtggaaatctccatatttttcaatgttgaatcaaatgttttctaaacctatataggccaaacaacgtatgtctgaaaaatctgtggcagtcagttttcagtggtggctttaccataatataaaaattagaaaatagagttcttactaactctggcaatgtagaaagcaaactgctacaaatacggccaataattctatgtaggcctttaaaaatttgtttaaaatctgtattctttggacaaatataaactcaataatcattacacattgaccctctacttggaatttttccccacttcggtgaaattccatacaacaccttctacactgggtatgtaatgctgctcaaaacacatgcctagaacaaaatttaaagtgcctaccgatccacaaccatcgttatataagaaacacatgtataaaggctaaagctatctaaaattgaagattttcaaaatctaaaaatgttgctgagaataagaactaaatctgctttgtaacaaattcactgaattcctacctacctggcaatgtatctttcttaaaaatgacagagaagcaaaaaacagtactaaaagaaatgccaagtatggcaactatggtaacattcacctttctactgggactacaaataaaaagtttatgtgggaccatgggtaaaagcaacaatgctaatccctctgttctggagatagagtgctggccagattgtcacaacctcctgctgagtagggaggattatgcttagcacttgatcttgccacctcttcttgggcacagttaatgttggcaggtacctatcctgggccaaagggcggttaattcacaaattagccatcaatttcatggcctgagtgaagagataaactggccagatcattgtctcccccaggaatttgaactaagaacaatttttgcctattagaagcatagccgaaggtagaaggatgctatgaggtggaggtggagctacggcaaaccaaagccacatgaagtcagaaactttccagaggaagtcagttggtagtaaaattttaaaaagcaaacactgggaccgtagcttagtcatacttagggggcacattactactatccatctcaagactaccggaagcccagcctcaaatctaattccacccagataccctaacatcccattgacacccttacaaccagcccccttttcctcaggtaacttgaatgggtctatgttctttgaaactaattgccatttcataggcagaaagctctacttggtctccaactcctgcctgaaaagccagtcagactggaagagtgagttacagaagtgttactttgaaagtatctgaagctagtctgaccgtctctctctcacccacaaaacacagctttccaaaatcaacacacaattaagagaaaagcagagaataagggactgtatattaatgaatatcttcttcgcaggaaatcatgctgtttatttaagtgttaatattaatcctcatgggagataagactgccaccaggattcagggtcagtgctctggctgatgaatggcagtcaccagaggcaagagaaaggaacatttaatttacttagctatttctaaatagcaaaatacttccttgtgggaacattggccttgcaatagctattaaccttagatttcatatgaattccactataattaacaaagttataaaagcattaggaagtagttaaaattcatttttcttactgtattttaggtctaagactaaaaaaatcacttaaaaattaaaaagggatgactcaatttcttgagagaactggaaaggatgccattttcttgttttgaaagcatgttaactttgacagaagtccactgataccatcagtgtaatactgacagtggtaagattatattgtatgttcccagtgcaaactttattgggggaaaattaaaaaggtgtgctgattattgcaatttgagaatgttttgaagcagtaattcttcacactaatatatctaaagaagcacaaatactgttatatgaagaagtttttttgtttgttttttgttttaaatagagatatggtcttgttctgttgctgctggcctagagtgcattggcgctatcctatctcactgtaacctggaattcctgggctcaagctacctgccctccccagcctccctagttgctgagattacaggcatgtgccaccatgcccgccagtgctttaaaaatgataattcagctaaaattgatttattgaaatgtaagaaaaacacttggccttccaaaatgctttcctgttgttttgaggacggggaaaacacaaaatcttgctcattagctttgaaattaaaaagtcacaagaaggtagaaaaggatatcctagtatcccgtaataggtatttcgtagcacttagcatctccactctataataaaatgctgagttgacagtctctgacttgaatatgcatcagtcttccctttaataatctccctccactcttttgcctacttgggcagcacataaaatttctggaccgcttgtagattaagaaaacccttgtctaggtcaaagggcaactcatacactcaactaagaaacccgtgtgctctatggaaatgtttctaccaaatattttcttttcccagcaattactcgagactaccttggtcctagctcccttagcttgaaagttccaaagataatggcttgcactctgagtattaaggatgcactgtactggctgatattctggtatccagcggtaacgttactccggcccttgctttcgtgtttcaggtatatattccctctgcggaactcagtccagcattgctagctgacaagcaatacacaattaagtctttatggaccaaaataattgtgatttcagctcaagatacattttataagaacatgggtccctaaaaacagcagttaacagtgacccccaaaattcgagacccgactccgagaatttcacatggattcctgaatatgctcttccgagaaatgtttcatctttattctaaacagaaagcactatgccaagacaggagccagctgggccttgggggacgggcactggtcttggatcaagaatgaggccgccttcccgagggcgggcgcgcccccaggatccccccgggctcgggcactgccgccccgggacagtgacccgcccagccgagcaccctcgccctgcttgccgcgaccccgcggggtcactgaagggccgaggcgccgctctcgcttcgctggcccctcaccttccacacctccctgcgaggaccgactccgcggccgccttggagagctctggccgcgggcgcctcacccgtcgggggccgcccgcgaagcgcagattacagggcgccccacaatcagcaaggggaggctgctccgaagctgagagcacagctcaaccggccgccggcgccgcgccgagctcgctcccgcgcgggccccagagcgcagacccgcgagcggggcgcgcgcccgccgcctcctccccgcccggccccttcccccacggcgcagtcctgcaaggactgggggcgcagcgcagggctccctgttacctgcaggaaggcggcgggggaggaggccgagggtcttggctctggtaccctgttggcccccctgttgacaccaaccacccctgcctgcctgtaaggctgtggccactacacccacaatcttctgggggccgggtttctcctacaccatagagacgggtccggaaacgggacagaaggcccaccttcctccctccgacgccaccaatgaggccaactaaccaggaaccgaggtagagaggccgcacagctgagtctcaggccggtgccatcttaagtgtgggcgccgcgacgataccgagtttcactcactgccccagtggtctagttagtccacgaagatgccccctttctagatgtgttggtcgaatgcttaagtttgtcttgacttgaatttttaggcttttaacagcacagttttaatttcatttccgcccaaatccaaaatggctgctggccacttgtagcaaacagtagaggtgcagggcggagaaaaggagtacgggaattagcgaggactttcaggagagtgacgtcactcaacctgtagctttgattggctgggctgcgagggtggagtcgtgcagagccgctgctggcggaggtcgtggtgatctcgcttgatctttgagagggaaggtcctgaatcacatttcatttagcaaaaagtaatatttgaaaattttaatattaatgcagtagttttgcccccctccatgctttctgcagtgtcagttacctgtggtcaaaccttggttcagaaatgttaaatggaaaactccagaaataaacaattcttaagtttcaaaccgcctgtattctgagtagcccgattaaatctcgggccatccactctgtcccacccttgacgcgaatcatctgtcgcaggtagccgcgctgtgtacagtatccactcattacccactcagtagctgctttggttaacagatgcacccgtagtatagcagagataatgagagataccacctgcttatgttcaggtaacccttattttacttaataatggccgcaaagcacaggaattgtgctgacaatttggatatgccgaggagaagctgtaaagtgcttcctttaaatgaaaaggtgaaagctctggacttaataaggaaagaaaaagagtcatatgctgaggttgccaaaatctatgataagaacaaattatccatgaaattgtgaagaaggaaaaagattcgtgctagttaactaagcacctatcatgcactgtggctgtaacttttgtagtttgaggtgcaacagcaaaagacggaaaaggcattacatttgtgggtgggagacatgaacagaaaacgtatttcagctgaccgcagtaagttttgccagaaagtgttgagcctataggaagacttaagaaagggatcccctgaaattaggcacaccaagctatttactgcaagtaagggatggctacacagattcaggaataggtttggactgaaaaacataaaaataactggagaggccacatctgctgatgaagaagctgccacatgtctggcagagttgaagacattggttaaggagaaaggcttccaggagattgatggataagttaggaaaatcattcaggtagcaatgaaactgcctttgcaaaattatgactaaggcagttaaagagatccaatttaaccaactccatcttgtccttaacctccatgctatccttgttcattcctgggcataggctgaactaactttggaaggaaattagtttataatttacagtttaaaacaaaaacaataaaagccctttcccaaaaccaacctccttcttgcctggggtctagactaccaacattagccacaagattagaaattatggtttgggagtcatgcagctggaggccacaagattctgaccctccctaaactgctcctgagatcagtgcttcagatgttttgcagaccctgcacttgatggatcagctggcaacacccagatgataaactggcccatctgatcttgtgacccccacccagaactgactcagttcaagaagacagtgatgccccatagtttcatctccgacccaaccaatcagcactccctgacttactgcccctccccacccaccaaattgtctttaaaaactcgactgctggaggagactgatttgagtaataataaaactctggccccccacacagccagctctgcatgaattctttgtctattgcaattccccgtcttgataaattggctctatctaggcagacggcaaggtgaacctactgggcggttatagcaagacaagttggtgaaaaaggatttgtcaatatgcttgatgaagaggtgggagaacatatcaaaggcctcactatccattctgaggacaggtttaaccttctcaaactagaagcagggcttagtcaccctggacagtctctagttctgtgcctcctcccacttcctctatgtggtcagtccagacatctgccttgtatgaccgcctctggtgaccacctccctatcgaaccatcaggtacaagctgcttgcttcatccccttgacccctataccccacatatactttgcagatatgcctcagtgaccacctcttagtcacagtgggactaagatgttggacccaggaccacagtgaaggctttggcccgcaagtccctctctctgtctcgtccccctcccactggttgagcatgtgtgtcccccttctcattggccctgtgaggcatgctgtcctcttattatggatctgtaagtaatgaaactgcttctattatttcacatgttttgttcacctcctctgtgtctcacctgacctatacacccacacctgacttgtttcctggttagggctctcctagagagtggctgtcttggttggaataaaccagacacggggcagacaagagccacaaatgtgcctgctaatataaacaagcttcctgtgagagggacctcctgtcatgggtcagacacctaggatttaggccgtctgccaggataaagaagtattccatggaaggcacactgtaaatatccaagccccatcacggaagagctaacgtttataaccactcccagagagagacctcgagaccgaattagaaaagaaatacaacacatagaccctaggtttactagctccaacatccattcccactcctcacccccttctcccttgttcaccttcgataaagaagttaagaaatcaaaaagatcactttctgagcctactttcccgctagggtggtcacaagttctggccggtgagacatagcagaagttgggaggaagatagacagtggattaggaaaggtttttcctccctattaaaggaaatggctgtgggtgtaacagcagcagccacccaagcaccaggagacagcgggagaacatgctgaggatgtcgatttgaaagacagaaggattctcttgcctttcacactatccctcgagagttcataactatgtttttcctccttttacaggaggagtagagatgagtcccttcaaccagtacgtgaaatcttctgcagtcaacacagctacttgctggcccaccctcttcccagtgtcctcacctctgagtctttgctggccttcccaccctgttccttgctccctaatcttatgtccagatgtgctgagctccagggtatcctctataatcattcatcagcctagaggactctgtatttcctttcatttccccaaggtaaacccactcctccaaatatcaatgagaagggaatattttgcagtgaatggagtaggagagagatgggagggagtttgacactcagtccttcccctcttcactcttcatctactcacctatttgctcttgatgtcactcaggtctctgaacaaatgtcacctgttcagactcttaaagatttggggcattgaaatcacaggctaacttgtatatttttgtccaacaaagatgcaaatctttctgtccagtggaaaagttaaccccaaagtttattcttattgcactagagagcatttctcattttaaaatctaatctagtaatcttactgtatttctttataaaattgcttgtaagtatgtagctacacaaatgctctttgaacagtcttaatgtctttttagtttcctcattaactaatgtgttcattttatatttgcatgagagttataattatattttgaaaattctacttgaatgcaatttatcagagacagctcccctgaaaacactgtctaaaacagcaccttacctgcctcttcctgtcttttgactttgccttattttgcttaacaccaatgcacatatttgttcagcatctctgtcccacagctagaacatcagctccctgaaaacagggcttccttccttcatttctttctttcctgccatatttctagcacataacacagtgcctagaacatactaggtactcagtaaatattaaacacacaaatgaatttactgagagcacactgcatgtcccaggcaccctccctacatctctctgcctcccagcccttaccccacagagccctctatagctctggttccagttctcagttccctggagctgctctctgagctccttctgcctttcttatgcatagaaatcttgtattccctcactgattcctcagtcctcattttaaatatgtctaaggccaggaaagaaaagaatctccaacaacctgaatccgctgtccttggaatgtggctggtgggacagttagaaacaaatagtttgttttcttaatagaaataattttttcttgtcatactgtttaaggatcaacctgaattttacttccaaccaatcctcttcttaattcaaatcaaaacatgtcaatggtattcagcttgacttttaggtgtttttttaattaatctttttcatgtttctaacttagattcccaagtagactataagtatcttggatatattcctggttctataaaagccttagccatccaacttaattatttttttccaacttgatttgaactaacttttttacaagctctacctgaaaaccaaagagagtaaaagttattcaagtgatttctatttaatgttctacctcaataatttgtgtaattgcataattgcaattagaatctggaagtgtaaagggggaaacttgcatgaatgacaaaccctccttcaggcacatttcagataaatacatatagcatccataagtagtggataccttatagaaaactgaactggacctaagccactttgttctctcgttgtttttaggaactttgcatagatattggaagatttctctaatgagaagtatgtgttttctaagttccaccataaccttgctaccactacaaagagagaatgaaagcaagtctgaggtgggattctacacattcacacgtttattagcaaggtttaaagacaggcagtagagctgttatacaaactcagtgaggttccacttccttgtgtaggagcttgaatagcatcttgcatgaaaggtccatccactgcaggaagatgggacagtattctaatagcagactcagctatcctcattagagctgggtgacaaaatcttcttgtaatcttctccatatggggctggtctgaaatcctaaatctagggcacctttccaaagtgtgtagattgctagactcactagattctcatactctgatcatgtaaggcatggcaacatttctattcattctgtccatcttgaaattacttattttggccatgaaaattcacttttaaacatccttaaagccactagtattgatctgagttagagatagctgaagtgtttgtagtatctgccccaggagtatagacttctcattgaaatctttcagatgctaaaagcctctgaagtgtgaattgcttctcaacttcaaagagccatgaatcatcttggaatcatactcctgggagaaagatttggggcaaacaatgtgtgcattatatatctacctcttctttgaaatacttcagccttcagggagatacagatgtgtactaacttagatctatcctgtaggggtggttaattaatatttgaaggcaacatgagcatcctctggaagcatgttaaaaatgcaaaagctgaggcctcacgctagattgtcgagtcagaatctacattttaacaggatctttaggtgatttgcaggcaccttccttgcaggaaggtttgagaactgccctaaatgatctaaggcctccctcctttggcctcactgctatcctcctgctcactaactctggtccatgctcagtggcctccttgctgtcctgtcagcatgccaggtgagctcttgccttaggacttttgctctagcgcttccttttcctgtcattctcttttcccacatgtccatttgactaagtctgttacttctattttttgttcagatctcgtcttctcaatgaagtctgtcctgatccaccctatctaattctacaacgtttaccttccttcctgctacactcctggtgcttcctatcctgttttcttttgctttttccctccatagcactgaccgtcttataaacagccatatactgtattttctagattgtaaaaactatagtttttcacattttaacatccctgaaggtcagaatgcattttaccacaaatggcataatataatttgtcaataattttttcttagtggtaccaaatatattgatgcttcctaaatgtgatggcatcatatatttgatgaaatatgacaatttgcttatgtattatggcttttggttttgagagaaaacaattatctgaaactttaaaataggcaaaagaggttactgtggctttcttcccatgcaattctggattaaattcctattgactaggttattttactacttctttattacctttttaggggcagaggctaactttttcattttcatccactagagatgtaaataagtttgtccagcacagcaaatcatcttaatggttacagtttattgtcctgtaagttattaacccagcaacctgaacctgacatgtctttatcaaattgcctacatatacacctatcttctcagctgctatttggactagtttaaaatcttactgattccctcattaataaaaacattaaatagagtctttgacatgtgttcattttatatttgcctgagaaacctcattgtacttttttaaaaaaattacattttaatggtttatttctcccctgctagaatgttaagtttcacaagggaaaaaaatctgtttttgttcaatgatctgccataaatgcttagaacaatgcttggaacattatagatgctcaacaattatttactgatgaatgaatgaatggaagtatagaaaaatatatactagtctgttaacattcaccatgtaaggtagggagaggttactttctttatatacctttttatatatctgcatattgttttatgtgttacagtgagcctacattgtttttgtttatttgtttaagagacagagtccaggctctgtcacccagggtgaagtacaatggtgcaatcatagctcattataactttgaactcttggcctcaagcagtcctcccatcccagcccctcaagcagcaaggattacaggcatgtgccaccacatccagatacattttttaaattattttttgtagagacagggttttgctgtgttgcccaggctggtcttgaacaccttgcctcctgcttcaacttcccaaagtgccgggattacatgcatgtatttttgtaattttaaagataatttaataaagagatgaggaactgaatgtaaagttgtataaaggaggaaaaataatcgttccttttccccctcttaatttcattgtctggggcccctataacaaagattgagaagagtaaaacaaacagaagtttattcatgtgtatttcatatacacataggagatactcaaagaggtggcttagaactcaggcatatatggcatcttcaacaaagaagaataaactcttagagaaataagacagaagaaaggatggcaaaccatggtaaggcaaataaatggaagtttttaatgtaggttcttctagtgttgacagaagctgcctttagtgatcaaactttgtgtttcctagtggagaggggagaaggaatacttttgtaaatttatatcttgttttgagggaagtaggagtaggatagagaactttttaaaaatatctgctccttctcaattgccttcagctgaaaataatccttatgccaaggaggcatattttgggcatattctagtctcctacacttaaattggaagcttttgagtcttacatctataaaacagtgcccgtagcctgtaattcctcatatgataacaatcttgagggtcttgtgatagtagctccaaagcattggtaggaaacaggaggggatacggcatggtcacatttcctgataaggtatagatggcagttaactttacaaatttatgccaagaaacagtaacttatgatctttagctagtttctcagtcctctccaaagctgtgcttccagctcaggacaacataaaaaccatttgctctgtttccttaaaaaaaaaaaaaaattccctgttgctcactgtactattccaagtctttctcagggctgccatctctcctgagtctctcccctcctccctgcaaacaaacacccaccccagtctcagttctacctcaaggaagaagcagctagatcggggaacttactgcttatgggacaaagggattcagtgcaatgtctgttccatcatcagcaagtatattaaaaatgagtaaaacaaatcccagtgattttagacctcctctgaaaacttttgccctcaattttgatactagtttcttaaaaaattattttcctcttttctcacagcaattgttttctcaccaatcttttgaattttttcatttactttttttcctaactttgcctctcactgtatggaatctaaatggagttcattaggaatgaatttattgatccagtgacattagcagcagtaaaagccactacggtgtgtacaaccaagtggcaaagacacgtgtgttcccaaaacacaaggaatagcaccactgctatcttctcaccatttttgataagagaggtgcggaggaagaggaagggcttatttgtcttttttatcttctgcaagaaataggaaaccaagaaacagctaaaggaaatccggtagtgatgtgctgaaatcagagtagccctaaaccaagtgtgtaaacacggcattttaataataggaattcagaccaagaagggtaattaggaattacatgaaaatgtgattacactaataaagttattttagagagaaaaactaaaacagaaattggtaccacaaaattaactctccagacaaaggttgggccaggtgtgcatttggttaggtctcagaggggagctcaattcagggcactctttctgctccccgtgatagtagacagtgaagtcacttgtctgctgggtagatgtgtgcatttggagctttgctgtgtcttcattttgagtacttttattgccgcctaaaaaatgcctggaccaatgaatggctgaacaaaatgtattccaaacaatggaatattatttggccattggaagggataaagttttcatacgtgtgacaacatggatgctgtgaaaacatcatgttaagtggaagaatccaggcacaaaaagccacacattgtttgagtgcatttatatgaaatgtccaggttagataaatccacacagaaagaaagcagatacatggttgctaggggctgggggtaaggaggaatgggggcatgactgctaatgggtaggaggtttccttttggagtgatgaaagcattctgggaactggataatggtgatggttgtgcaacctttagaatatactaaaatccactaaattatatttttaaagtacattttaaatgtaaattttaaaaaggtacttttatggtatctgtattatttctcaattaaaaaaaaagaccatgctatgtgtattagtccattcttgctcagctataaaaacatacctgagactaggtaatttataaacaaaggaagtttaattggcttatggttccgtgggttgtacaggcttctgcttctggggaggcctcagg

SEQ ID NO: 383 - DNA, 66537 bp, Homo sapiens
agttccttggctctggcagctcctggccccccaatgcttcactgtcccctacctggaaagagtttgctccaggaaggcagcgttctggctgacagcatccactagcaggttgaagtccatctgcacagcataggcttgctccagcagggcactggggaccagtgaggggaagagcgtgaatggggcatagctcaccacctgtgatcaagaagagagaatgggacaggggtagggcacctgtgaacgggttgtcttcctgcaaatggaatcccatggaaagtctggcctatatttactgaggacacaccaactgtagattagtggttaccttgggagagtggaagggggagagtggaacccagagagcttccagattctgtgatagtttatctctacgtattgaagagagagaagcaaaaaagcaaaatgcaaataacaaaaagaaacccacaagttattgagcacttactatgtgcaaggtactattttaaatactttacatagattcatcattcagccctgtgaggaagatactattattatccacacttaacagagacgggacctgagaaagagaggttaacagatccaaaattatattcagctaggaactggtgctgggatttgaaccagaacagttaacagatccaaaattatattcagctagtaacggggtgctgggatttgaaccaggatggttactaaacacaacacacacatacatacatggaagcctgctccttgctggttgatgttcaagcccaggcccttccatgcatcaggagctcacactccagtttccttgccttttgattttgatttggttactgggtaggacaagtgaactctggttcccttagtagaagccaggagtgttttttccaccaatgttagtgatggtgactcaggttaacaggcctagagttcagctgcattccgcattctttggactttatcatagacgagaaacccaaataccatcaaggacactgattctagaagggaaaagtgcattctgagatccctgccaacaactgaactagaacttgggtaagagatgaaaagaaaatcttgtgacttgtattataaagcattcctgagtttaacctttgagttaatatcagtttgtcattatggtggtataagtttacggtgttagaacttggtatttagatatttatttttaaagtactatttttttttttgaggtagagtctcactctgttgcccaggctggagtgcagtggtacaatctcggctcactgcaacctccatctcctgggttcaagcaattctcctgcctcagcctcccaagtagctgagactacaggtgtgtgccaccacacccaggtaatttttgtatttttagtagagatggggtttcactgtgttgtccaggctggtctcaaacacctggcctcaagtgatctgcctgcctcagcctcccaaagtgttgggattacaggcatgagccaccatgcccagccaaaatattattatttttttaacaggtaatacaaatacatgatacaaaattcaaaagagacataagaatatatagtgagaagtatgtctcactctcattccagtctcctggggaaaagactgggccccagccacccagttctcctccccagaggcaaatgacagactagtgtctcacacatccttccagtcatctttgtattgatatatatgtatacacatatattttctctttttttcacccccatagcaaactatactacattgtgctttttaaatatttccttatatgttcaaatagagcattttcattatttttaattgctgtatattattctactcttaggatataccataatttattgaatctagtatataggtggtttctttattttcctattaccattaatgtttcaatgggtatcctagaatatacattctagatattttcatatatgagaaagtccatacattctaaatttctaaaagtaaaaatatcaagtaattcaggtaaatctattttaaattttggtagataatttctaaattacccttctcagcatcttttttttttttttttggagtggggtcttactatgttgcccagactggaatacagtggctattcataggtgccatcatagtgcactatagcctcaaattcctgggctcaagcaatcctcctgtctcagcctccccagtagctgagactgcaggtgtgtaccactgccctggcctcagcatctaagataaaactgaggaaggctatttgtgagaataaggtttattcagtctgaagcctttatgagttagaatgggaatgactgcagattacataaggggtgacctaataccctgagtagctatgtgatgactacaggagcatttccttggcttgaacacatagagctctgctgcccccaacaagtctcatcttggcctcaaaaactcagagtttttctgctaagacatccctctgcctctgtcccagggctcattatgccctcctgaatttaggatcaatagtttatagctgttctctgctatctacaggctaaaggctgaaacacacagtcttctcacttttgatagagacattaacataaaatgacattactggccgggcacggtggctcatgcctgtaatcccagcactttgggaggccgaggcgggcagatcacaagatcaagagatcgagaccatcctggccaacatggtgaaaccccatctctactaaaaatacaaaaattagctgggcgtggtggcacacacccgtagtcccagctgctctggaggctgaggcaggagaatcgcttgaacccaggaggcagaggttgcagtgagctgagatcgtgccactgcactccagcctggcgacagagtgagactctgtctcaaaaaaaaaaaaagaaacatttttctactatttaaaaaaacctatagcacgtgcatgacaaaattctgctttgtagccaggaagcaacagggagtgataggaattgtggcaaaaagaagtacttgcatcttctctaaagggggcagccagaactctgctctagccaattgttgccatgcaggaaagtaggccagagttgccagatgatataatttttcaagacaagttgggttgctagattttttgttttaatttcatgatttttttttttaaatgttggctctgactttttaaaaatactctggtgaaaacaactgttaacaatgcttgcccctggtcagggaaacagtggctggaggaaggggacttactctgtactgaatacccttttgaattttgcgccctgttcaaatgtatttgaacgtattacttattgtaaaaaacaaattaactccccaaacactgcaggagccaaatactcagcctagatatggctagtttgcagctctgatctacaggataaagttcatactcctcctccacccagtagctaaggccccgcggctgtctgacgctggcctgccttctttcccactatatccacttatgcgccctgcatttcagctgcattctcttgaacatttttttttttttttgccttttcctacttttgggtccttgctatgctgttccttttccctatttgtcttttaaggtctagttcaaataccaccccccatctcaatcatctaatcataatgaactactctttcttccagctgtcctatatagtatcttgggagaggaaaaaaagcatggatgttcagagcatggactcaggagccaaattccttgggttcacatcctggctctgccaattattttaccatttaaataacctcaggtaggttacttagcctctctgggcttcggtttccttatctctgttgtggtgaggagtcagtgattccaaagtgtttagaataatgcctggcacatactaaatactcaataaatgatagttaactttgtgtagcagactgcctgtgtttcctcatagagctgatgttatttaattttgttttgtggtatgttctctaactagaccaggagccccagaggctagggctctggctgactcacctctctgtcctcagtgcctacaatggcccggcatagagcaggcatttggtaaagatttggagtaaaatcattctctctctctctctctcacacacacacacacacacacatacacacacacgtacactttctgactttttttctggattagaaatctcattgtggattacgccttttctaggctccataacctcccagaaagaccaagtgttggatcttcacatggtacctattgattaacagaagaaacaaaagcgtggaagagaaaatgcttcattttagattcatacaagtaattcacaaaatctaggttcacagcccaagcaattctattccataccatcagcctgccttaggtgacagacattgtcatttacttgggccttagcaaacaattactgagtgtggactccatcaggcctgtgtaggttctgggcacacagagacaaaaaagaatgggtctggctaaaaaaagaagagatgttggcagctctttagtcaccaatatggtcttaaggtgtactgttaagttaaagaaaaaaaagtgggcaaaaggaggctgggcacggtggttcacacctgtaatcccagcaattttggggggcagaggccagtggatcacttgaagtcaggagtttgagaccagcctggacaacatggtgaaaccctgtccctaccaaaaaaaaaaaaaaaattagccaggcgtagtggcacatgcctgtagtcccagctacttgggaggctgaggtgggagaattgcttgaacccaggaggcggaggttgcagtgagccaagattgtgccactacactccagcctgggcaacagagcgaggccccaaggaatatatttacttgttattagttacttgttatgaataagccatctgaaaggatcaacaagaaaccaaaacacaagctgcattagggtaaactcttgtaccatttgaatttgaaccatgaaaatgtcttacctagtcaccaaattaaaaaagattttatttttttatttttttttcttccctaaggatgaggttttaaaaaggtgtggtttggactcagcagttctacttttacgtattgaacctggagaaacactcacataggtgccccaacagacatatgcatggatgttccctataatgctatttatggtcataaaataatgagaaatcacctaaatagacatgagtagagggaagctaaactgtgatacacccacatctggaatactatgcctcagaatgaagatgaccctaatagaaggcattagaaagttctaagacagacaaataaaaaaccaaaaacatatcatagaataatatatatgatacaatttgttttttaaaaaagacgtatttctatatatacctatctatgtatataaatgcacagagaaaggcttgaaagcatatatcacaaaccagttacagagaaggtagagtgattatggggttttcagtaatagctcactgggcaaagtgcttcacatgaatcatcctgtaattctcttaccaaaccagtgaggtaggtcctattattatcccatttttacacctgaagaaactgcagctgagagcggttaagtaatttgcctaagtcacacttcaaaccccatatttaaatttgattactccaggacactgcctttttattttctacttctagagatcaattttagttactggaaaaaataaggcaaaagagatatggtccctgatgcaaaggagtgaccctcagcctggccggggccagacagtgggccatggtgaatgctgtggggaggagctaggggcttacctccgaggaagtgggctcctgtgaggtcctcagcaatactccctcagccagggcccggtccacggcctgccgtgccagctcctctagctgctgtttatcctgcaagaggctcccccagttggtggccatcccaacacctgcaaaagatggagagaagagagttggtaacagatggcctgaagcccagcaaccaccgaaactggctggcggccacccccaacacagcaggaccctgacctctgttggaagggaacagcgtggtatacaggagtgaacactggctggttctagctcttaacaacttccatgtgcacaaaatagaaagcttgacaaagcatttccattgccactctctcttttgattcccaacacaatggcattattctcacagtaaggaagcagaggcttggagaggtgaaatgacttgcccgaggtgatgactggtatagcctggacttgaacccatgtctctggactcccagcctaaaggctcttcattggagaaagaagcactaatatcagatgtgactggggcaagttccttcccttcccagagctacagattccctaactgtgaaacaagaagaatcggatagatcagtttccaaacctggctgaacattctggggagctgggaaagaatacagattcctgggccccatcccagagactctgatgcaagaggcctgatgggaaggaggggttgaggctttgtatttttttttttttgatatggagtctcactcagtcgcctaggctggagttcagtggctcgatcttggctcactgcaacctccgcctcctgggttcaagtaattctcccgcctcagcctccctgagtagctgggattacaggcacacaccaccacgcctggctaattttttgtattttagtagagacggggtttcaccgtgttagccaggatgatcttgatcttctgaccttgtgatccacacgcctcgacctcccaaagtactgggattacaggcgtgagccatcacacccagccgaggctttgtatttttaacaagttttcctgggataggagtcactgcagtacattattaattcccttcaagctccaacaactcatgtcagcagatctcaaataaattacatgggaagggggagggagctctttgtggaataccatgaaatgcgaataaggtgaactcctcccttatacaaaccagaaggaatcttagtagcaggaaatgactacattccatatatggacatttatcatcaaagcaccaaaagacagaaaatatttttgagaaatcacattagcaagatggaaattgctgaaacccaagtgtccaatgtaataggagaagttgtctgattggttgcccagagacatacagaggtgtacaaactcacaccctgatactcattcatttttcagcaggcctcaggagtttaagatctgggtaaaaatctggaaacacagtcactaattttgttctgccctgttgccatttaacagaacatggttgcccaactcagtggtccccaggaagggagttagagaataataggaaacctccatcacattcagctctgtccccctgtccccatgacagagccagtgccaggccaattatgaaagtctgccagcctcagcacaatgctttgaaagaatgcgcatgtgatctcaagagggtcctgataatatccctgttgagtgagacatacatgagggcaatcatagtaaagaacaaggttcaagtcagacagacagacagacctgggtttgagtccataataatacgacttctccctttcccttctttccttccttccttttccctttccctttcccttccctccttctttccttccttccttccttctttttctttctttctctctctctccctccctctttctttctttttttttttttttgacggagtctggctctgtcgcccaggctggagtgcagccgcacgatctcggctcactgcaagctccgcctcctgggttcatgccattctcctgcctcagcctcccgagtagctgggactacaggcacctgccaccatgcccggctaattttttgtatttttagtagagacggggtttcaccgtgttagccaggatggtctcgatctcgtgatcccccactctcggcctcccaaagtgctgggattacaggcgtgagccaccccgcccagccgacttccctttcaagtaagattgctgtgtggattaaaagagaaaaatcagtgtgaaatttatcagcagtgtttgaagctctatacatgagaccattttttggctgtactctctttataggtaggaggagacttgtcagaggtcacacagaagcctagtggcagagccaggacaagaacccattaccttgacattagagtaatgaaaccctccatgagcccccatcgttccacaactctgaaattccaacatctgtttgctgttgggcttttatttagttggcaaacactgatttgcatttaatgccactcccttgactaggtactggggatatggaggaggataagacataaagataatcaccatgggccaggtgtggtggctcactcgtgtaatcccagcactttgtgaggccgaggcaggcggatcacccgaggtcgggagttcgagaccagcctcaccaacatggagaaaccccatctctactaaaaatacaaaattagccgggcctggtggcgcatgcctgtaatccgagctacttgggaggctgaggcaggagaatagcttgaacccaggaggtggaggttgtagtgagccgagatcgtgccattgcactccagcctgggcaacaagagcaaagctctgtcaaaaaaaaaaaaaaagaaaaaaagaaagaaagaaaagaaatcagatgaaggtgctaagtgggccctttgtttttctcattctacagcctcaaccctcccttggctttatttatgttttgctgatgacattcaaatctacatcttcacagcaatactttcctaccttcaaactagaatatccaattttttcctgcgagtctccatacaaccagaatagaatttgttgttgtctcccacaaatctgcttcttctctgatgaaccccacccaggtacccaagccttgagtacttgtttcctacatctcactctccccaaatcctatggattttgctgcctaagtatatagtactttgaattcctttatttatctccatttccagagtttgtagcctagccccggccactgtcatctcttccctgggcgtgaaacagattcagagtcaggtgtcttcagtgaccaggatatgttggcctctgtcccccttccaggacttggcacgtgctgtcttctctttggaactctcgccaccactcctgatctgggctcgcgatttcgttccggaagctgtccctgttctccgccccgggcttctacattctacagcccatcacttttccctgtaccgtaggaacagtgtttgtcttgatcacttctctacctagtaattagccgcgcttagtactgtattcattcatcacatgaatgaatgaagaatgaatgacagacgggtcagatcaccgaaagcctcaaaacgcccacaaggaaatcggtcgcactttatcgccaggacttaggccagtgcctggaaaggccccgaggcaacgacacggtcggctgcccaggctggccccacttcacgggcccgctcgcttccaccctggacaaagtttggccctaatcgctccccgttgtagctctaactggctccagtctcactggcctacatgccccgacaccggcccgatctaaaggcagaagatccggaaagtctgggatcagtgcgcgccagcccaaccccctcactagacactagttgccccgctcctacgaagggtttcagccacaaggtctcccggcctccggaattccaatctcttgccagacccctccctcacatcgttcctcccgaggaaacgtgacccatgccggccgccgtggccgccccaacctactagttcgcctttcctccgcgaacggttctcccggccctcgcgccgctacccaggctcagggggcggggcctcgatgcgacccagtgcgcttgcgctgaccgccccggctaggcttaaagagcaggcggggcagagacccatacctttggcgctgagtcgaggccaggaaggggcggtcgatgagagggcggccttagcattaggagtgcgtcggctgcaccctggcggatggaccttgggaaggaggggaggggaccatcggggtcggcggggagctacgggtatgcatagctcatagagcgtcagagctgacgacgactagtggaagatggggaaactaatgctcagagcgggacagtcactacctcaggggcacacaattgataagggtgggggtggccgtggtaatggaggccccaaggaggggcaggggcccatagtacgtcaggggctgagcctgtattagaacccaggcttgtttcccagcccagccaagtcccagaaaaatccccctgattttatctatttttttttaacctgggataccagcagggaaagcattagaggcaaaaggaaaggattttcatttttccaggaatgctgaagtcaggactgtttgaggggagccctgtgtttctcagactctcttgtaccgtttacatcaggatctggggcagtttttaaaaatatgcggattcatgattcctaccccccacctcattgcttggcagcccccaggtgccttccctgtttcttccttctgggttgtgataggcttgtctgcagtccgaagcacctgatacgaattttagttaaatggaatgtatcagtccagcttctagggaattaaccataaataagacacagccactgctttcagtctgataagataggcaataaactgcctttctgaaggaatcagggatggtttttggggtcttgaaggatggataggaaggtataggtagtgaaggaggtaggggtagaggtgagaggctgggatggggacagtgttccaaattgcaggaacaaaagcagcaaaggctggctgggtgcagtggctcagacctgtaatcccagcactttgagaggccgaggcaggtggattacttgagctcaggagttggagaccaggctgggcaacatggcgaaaccccgtctctactagaaatacaagaattagccgggtgtgttggcccgtgcctgtaatcccagctactcgggaggctgcggcgtgagaattcttgagccccggagacggaggctgctgtgagctgagatcacgctgcagcactcctgcctgggtgacagcgtgagaccctgtcctaaaaacaaaacaaacgagcagcgaaggcatataattctgagggttgctcggcttgttttacagacactgaggagtttggtgtggataatgaggaagggcctgagggttgcaacaggacttaggcgcttaggcttggagaggtagcctcagacgccagttccactgagcaacaggagctaagggctttaagcaggggaaggacatggttagttttgtgtgttaggcactggttacagcgtgacaaatggtttggaagtggggagatgggccagagaaagcagagagagttaagatgtgagatcatgaggctgtagccagtgcagcagctgtggagatggagcgaagcgaacagatcaaagaaatttaggagtgagaactcctagtgatcgtaaatcagtggcccaacccagggaccaagatccttttgactctttttttttttttttttttttgagacggagttttcgttgttgttgcccaggctggagtgcagtggcacgatctcagctcactgcaacctccacttcccaggttcaagcaattctcctgcctcagcctcccaagtagctgggattacaggcgtccaccaccacacccggctaatttttgtatttttggtagagacagggtttcaccatgttggccagattggtctgaaactcttgagctcaggtgatccacccgccccagcctcccagagtgctaggattacaggcgttagccactgcgcccggccccttttgactctttaaataaaccatgtacattatctgactacaggacaggctgagtcctccagtctcccgtgtgtggtcacgggatggggggagatggtggcagataggtgtctggttattcccagaacaatgtttcctgatgtcctttcctcgttggcttttgtacctgaggggataagcagctgttaactagaataggccccaggtggcaggaagaggctcctgggtcaaccaggaacaaaagaagctatttctagtgcagcatgaaattaaaaatcaaaagcatgacccagggttctctgtgcaggttcccctcttccaagacgggtgccaagtgatgagtatcaggtgtctatggtgagatttggggaggatcccagaccttaacagccctttggttgaaacctctcacaatgtggcaggtaagatgtctttattcccattttgtagatgtggcagctgagcctcagaagttacgtgacttgttcaaggtgacccagtttgtggtaggactgggagtgaaggactcttgactaagaatctttccagggagcgtttgccctttctgcactctctgcctgggtgctttcctccaaaatcctggcatgactggctcctttggtcattcagatgtttcatccctggaggctgccccaccctataagtctatcacgttatccttttcttttttttgagatggagtctcactctgttgcccaggctggagtgcagtggtgcgatcttggctcactgcaacctctgtctcctgggttcaaacaattctcctgcctcagtctcctgagtagctgggattacaggcacgtgccaccatgcccggctaatttttgtatttttaggagagacagggtttcaccatgttgatcaggctggtctcaaactcctgaccttgtgatccgtccgcctctgcctctcaaagtgctgggattacaggcgtgagccaccgtgcccggccttgtattttcttcatagcagttattcatatctgaaattgttgcttttatttgtttgctgtttccctctgctagaatgtgagccccatgaaaatgggccatgtctgtcttgttcaccactttacccccaggacctgactggtgcctgccacgtggcagatgctcaataatatttgctaactgatggaaatagtttggggagagagaaagagaaggaaaccaacatttaatgaaagctgaggatgtttcaagtacttctcacaaattacctcatttaatcccttcacagcctttcaaggtagaaatcgtatctccattgggtgaataagaaaccatgctaagtcaggtcaagtctgtggtttgttacttttgaggctatagactcgtctgagatccattagtataaaattttgcatcagctacgtggaggaattcacagaccttctcaggctcacttggggatctcagatcaagacacataggattggggaacttgcccagggtctttttggccccaggcctttgctggatcctcactccctggcaaggatggagtccatgtagtggactgtagggaacctgctgaagattccggagcagagggagatgatttgccctgagcctctggtgtctcagacctgagtttgaatcctgactgtgcagaagtcatctcacctctccgaatcccactttcctcattttattttttttctttctttcttttttttttttttgagatggagtctctctctgtcacccaggctggagtgcagtggcacgatcttggctcactgcaacctctgcctcccgggttcaggcaattctcctgcctcagtctcccgagtagctgggattacaggcacatgccaccatgcccagctaattttttgtatttttagtggagacagggtttcaccttgctgtccaggctggtctcgaactcctgacctcgtgatctgcctgcctcagcctcccaaagtgctgggattacaggtgtgagccaccgcgcctggctttcctcactttcaaagtgaaatctgttttttcctaacaataactaccctttattgatctggtcgctaagtgtcaggtacttggctaatgactttacagtcgttatctcactttcccttacctccctatcacatcagtatctttatagcctccattttacagccggggaaaggaaggcttgaagaggtatcctgacttgccaaagatcacagcagcagtgtcagccatggtgttcccacatatgtaccttgggacatgccatgggctcagacttcccaaagctaactgttgaatcaatttcatcctctgttcttggggtttgtgggaacatttgggtctgaattaggtgaaaaaaggtatgcagggatgtacttcactgtgaatggaggccaatcccttaattttgtgtcttgcctttctccctgcgagggcctctctccaagtctggactgtgggttttttttgtttttgtttttttgagatggagtcttgctttgtagcccaggctagagtgcagtggcgccatcttggctcactgcaagctccgcctcccgtgttcatgccattctcctacctcagcctcccgagtagctgggactacaggcgcctgccaccacgcccgcctaattttttctatttttagtagagatggggtttcaccgtgttagccaggatggtctcgatctcctgaccttgtgatccacccgcctcagcctcccaaagtgctgggattacaggcgggagccaccgcacccagccactggactgtgccttttgattggaacatctctgtcagccccagggtctgcatcacacatggtctgcatctgtgcacatggctactgtctctttttagcagtgatatcaccctgcctcatactgttgtttatgaggccatctccccacctggctgggggccactgctttggccattcagagtggaattcctctgtcttccagcccctagcacaggcctgggccagcattgctgctcaggaaatgcctgtggaatcaaagtgaggactgtcccaggtgttgaggatttactgtatgctaggcctgtccctgacactttatatgtgttatctcatttacacccccacagtcatcctgggagggagaagttactctgcctattttaccgagaagaaacagactaattgaagttgggctttgccttaggccctcttgtggtggttgatggcacgagggccaactctagggtctgtgccctggtcgtgtttgaggtgtgtgggctgaaaaagggaagacacacttcaaggctccagggatcctcagagaccttctactaacaggttcccagtccggctctcatttcatccgtgaggacacagaaggttagaaaggggagataacttacttatagaccctcttctccacttgttatatacttatgtatccacttactttttggcaggatggatctgttttgactcaacattgtaccacccatgtagcccagtgcctaatccaggttgatgcccagtaaatacttttacattttatttattatgaaaccactgagaaaggtataaaaattaacagaacaaatacctgtgtacctaccatccagcttgcaaaataaaacactgctaatataaagacctttttgtttccctccatgactgaccccccaacccaagaagtaaagactctcctgatttggtgtttattattcctatgcaatgtttattgagatataattcatgcaccataaaactccccctttaaagtgtgcaattcagtggttcttggtatatttacaagattgtacaaccattaccactgtctcattccagaatattttcatcaccacagaaagaaacctcatccctattagtagatactccacaattctccttctccccagcccctggcaaccagtaatttactttctttgtctatggatttgccttttctgaatatttcctgtaggtggaatcctacaatctgtggccttttgtaactagcatctttcacttagcataatgtttgcaaggttcatccatgttgtagcatggatcagaactttattccttcatatggctgaatagtctttcattgtacagatatatcacactctgttcctccactcatcagttgataggcatctgggttgtttccactttttgccattaagaataatgctgctatggccaggagtggtggctcatgcctgtaatcccaacactttgcgaggttgaggtgggaggatcacttgagctgaggaattcaaggccagcctgggcaacataaggctctctacaaaaaaatttaaaaattagccgggcgtggtggcatgcgcctgtcatccccactactagggaggctgaagtgggaggatcacttgagcccagtaggtcaaggctgcagggacctatggtcacgccactgcactccagcatgggtgacagagcgagaccctgtctcaaaaataattataataatgctgctatgaacattcatgtacaggtttttgtgtgaatgttttctgttctcgtgggtagatacctaggagtggaattgccgggtaatatggtaagtatatgtttaactttttgaggaactgctgttttccaaagtggcagcaattgtatcagagctccaatttttacatcctcaccaatacagttatccctctgtatctgtggggaattggttccaggacctcccatggataccaacatccaaggatacttaagtcccttatataaaatgatgcagtgtttcatatatgcttaagtcccttatataaaatggtgtagtgtttcatataaactatatgcatcctctcatatgctctttaattttgttttattttattttaaatttaaatttatttttatttattttgagacaaggtctcactctgtcaggctggagagcagtggtgcgatcatagctcactgcagccttgaactcctcggttcaagggatcctcctgtctcagcttcccaagtagctgagactacaagcgagagccaccacactgtcctttccatgtactttaagtcatctcggccgggtgcagtggctcacgcctgtcatcccagaacctcaggagaccaaggctggcagatcacctgaggtcaggagttcgagaccagcctggccaacatggcgaaaacccatctctactaaaaatacaaaaattagctgggcgtggtggcgcacacctgtagtcccagctattcagggaggctgaggcagagaatcgcttgaaccccagaggcagaggttacagtgagctgagatcgcgacactgcactccagcctgggtgacagagcgagactccgtctcaaaaaaagaagtcataaatgctatataaattgttatactgtattgtttagggaataatgacaaggaaaaaagtctgtacatgctcagtacagttgaaacattgttttcaaatattttcaagctgcagttggttgaatacacagatgtggaacccatggatatggaggtcccactgtacttgtctgattgtggccatcctggttggtcattgtggttttgatttgcattttcctaatgacaaataatgcgcatatcttttcatgtgcttattggtagtttgtatatcttctttggagaagggtctatttaaatgttttccttatttgtaagttatttgtccttttattattgggttgtaggaattctttatatattcaggatagtagatccttccttatatgtgatttgccaataatttgtcccattctgtggatggtcttttctgtttttcgatagtatcttttgaagcacatattttaaaattttgacgaagtccaatttatttattttttcctttgcttgtgctttgaatgtcatatctacgaaaccattgcctaattcgaaggtcacaaagatttacacttactttttctaagagttttatagttttggctcttaaatttaagtctttgattcattttgagttaatttttatataggatgtgaggtaggtcttatgcatttttaccctcctattaggtgtatttctaagcaatatatgacactttttcatggtatttgcacttttaagtggtaaattatatgattcttgtgcagcttgcttttctctttcagtgttatatcaggagatttatccatgttttaaggggaaatagttcattcattttcactgctctataggtttcattgcataaaaataccaaagtggcagcaattgtatgagagttttgtttattctcctgtgaatggtcacttgggttctctagtattttattactatatatggtaaaaagactaatagatgcctcctgtgcagtgtgttgaaggtcgtgagcatattcagacttacaaggtaatacaaagtttctttcccaaatggttttgcaaatgtgcactcctgccagcagtgtattagaattgccctcattctgcatcctcaccgagacagaatggtcaaggtttctagcttttgtcagtctagtgatgtgaaacggtgtctcgttgtgattttccagattaatagcaagatttgtttttcagtaagtgtttacatggttggatggatgaatgcatgaaagcagaaggggcccagaataaccctttactctgcctgttgttggaggatggcagggctctgggcctagactatgtggctctctgtagggacaccgtggagctagagaatgttgggggcaggctgacaactctagatgtgggagaggacggttgtcaccttgaaactagtgatgggagcttctctctacccagggagaggctatcgtcctgctcttccatctccttgaattttccaagaagggagggagtggagaaagagtgaagccaaaagagaattcctgggactgggcgcggtggctcacgcctgtaatcccagtactttgggaggccaagacaggaggatcacttgagaccaggagatagagaccagcctgggcaacatagtgagatcccacctctacaaaaaatttttgtaaaattaaaaaacaagggaattgcctaaggatgagaggtcacagtggcctaagtgacccttaggaatgaccctttttctgggactttttcatgatctttatattggtgtgacatgaactttccttgtttaatctactgagtttggagatggtcttaatgataataagaaaatgaatagtaatgattatatgttgaactcttatgtgccaggcacttacgccttttctttttaaaaataggtattatctcattcaattcctatgggacaggtactattagtattcccattttattttatttttaaaatagggatgagtctcactgtgttgtctaggctagtctcaaactcctggcctcaagtgaccctcttgccttggcctcccaaagtactgggattacaggcatgagccaccgcacctggctcattcctgttttatagatgaggaatcagaagatcaaagagacagagcaactctgagggtttgcacataggcagttggactccagaactcttaggcatcatgctgtgtggttaacctggctcagccgaatccactagagcaaagaaaagagaggcttgcccaggcttgggtgagaaacaggagtcagaatattcactgggcctggcctgagggcgcagcagggagcagagcgagaggccgctgggaaagatggttctcaaaagcagaagcctcacgccaggggacatggcccatcagcaagcacatgggtgcctcttctgggcatgctggctgctggggacccagaatgggatctgtctgctcctgggtctcaagaaagacctgtcttgtggggtagacagatgataataagcagacttacccataagtgtaatacactcagaaatggggacatgtgatacagagggtgaagagagaacctttatagaaaggacctagtttagttaatgtagtcaaaggaagcccctttgaggaggtgacatttgagtggaggctcgagaagaaggaagcagccatgccccagtttggggaaagagtaaatggcagatgcagagtccctgagacagaaaggagctggtttagttgtaaactctcagaaggccactgtatctggagtgatatgaatgagagggtggggctactgtagatgggctggtcagttggcagggccaggtcaggctgggtctccaggccagggtcaacatataggtctatagccaacatgtttaaataaggcccataagactgtcttcttgctgtccctgagaactgggtgtttgcatatttggaagggactgaatcctgatgcctaggctgggaaagagggtcggggggtggggagaattcttggcttctggccctagaaagctggaacaagaatttggaggctgcatcccactgactcccagatgggttggagggtgggtggcctcagccaccagggccctgtgataaggtggcaccacatactgatagctgtccagatatccttccacaggtgaacggttcatcaaactgtggcgcatccatacataccatgagtaccactcagcaataaagacacaaacatgaaatgagcaacaccttggaagaatctccagggacttatgtggagtgaaaaaagccagtctcaaaagagtacatcctatatgatttcatttatgtaacattttggaatgacagttttagaaacagaggacagactggtggttgccaggggttaaagatgggagggaagttagtgtggttctataagggcaacacctttttattgttagaactgttcagtgtcttggtggcagtggaagatctgtgaattgacacgggtgatgaagtcgtatagaacttaatacatgcagatgtgcgtgcacacacacgctcacaactagtacatgtaaaactgggaaaatctgaataagatcggtacattatatcaatgtcaatagtacagagttactgtactattgcttacaattgcatgcgaatatacaattatctcaatagaaattttaattaagaaatgaaatttggctaggcatggtgaggcacgcctatagtcccagctacttgggaggctgaggcagggggattgcttgagccaggagttcaaggctgcagtgagctatgattatgccactgtactcgaacatgggtaacagtgataccttgtctttaaaaattttttttttaaaaaagggaggctgagcacggtggctcacacctgtaatcccagcactttaggaggccgaggcgggtggatcacgaggtcaggagttcgagaccagcctagccaacatagtgaaaccccgtctctactaaaaatatgaaaattagctgggcatggtggcgcgcacctgtagtcccagctactggggaggctgaggcaggagaatcgcttgaacccaggaggcggaggttgtagtgagccgacatcacgccactgtactccaggctgggaaacagaacgagactccatctaaaaaaaaaaataggaaatttaaggcccaaagcattagatagaatgatagagatatttgtactaataaaattttcagcccatggaaaaaaaatctgaaggctctgctcaaggaggtctcttgtccttgagttagcaaagtcacagggaggtaggcagtgtgcccccagctgtgggagcaagcagggtcaccctcaggacactcaatatagagcggtggtaccctcagaccctctgggtaggtttcccagcttagccttttgggcctccctctgcccctcacccctcaagctgattgaccacgatcacaagggtagagcagagctacagcaccccccgccctccactgctgcttggtctttcatggagaacagacattctcctgctccccactccaccaggttaggtaaggacccttcctggggaggcccctgtgtcaactgtgcttaaccgtctgtgcctgtgtgtcccccagcagcctaagactcctgaaccttcagaacaaacctgatgccaattccaacctggagggcacgggagagtgtttgtttgaagcactgaactacatgggaaactgaccaagcctggggcaagcccatcctgagaccccaggcagggcctcagctttggtccaggatttgtggggtggttttacaagatcctgggatttcacatgtgggccccactaagacctctcttccagaatgttggctgcattgggcactgtctcaaattccacctacagagtggcagacccaaggcttcccgccatagtaccccaacacccacagagccacagctgcatcctcaaattaattgacatcttcccatgggctgagcactttgtttcatttatttctctcaaccacattacaaggtaggtcttctttgtgtatttattttgcagagaaggaacccagggctcagagaagttacgtaacttgcccagggtcactcagcttgtaaatggcagagcaaggatttgaaaaggcagtcctgacatgtggcaggcctgaacgagtccctgcagatgcaaagctgaaggagaaacattgcctgctcttaaggagctaatgataatatcaccagatatttacatagtgcttatgatgggtcaggcacaggctaggctctctgcatgtgttatttcattgaatccacaccacaacccagtggaataaggttatgcctgttttatgatggaaattgaagctccgtgaggaagagggacctattcaaggtcacatagtgagttggaaagtctgacctcctcttgttggcttcttccatcctccaggctggcctcccaggcccctccctgctcgtggtctgtacaccccttctcccttacactcggctaagccttgtccatggcccctgcccctttcatgtctattcttagcatagtttggagcctgcggttgggccacattatctggatggtgacccctgggggtacatcttctaccccagtgtgtcctttagcccttcctgtctcttccagctgtgcagcaaggggcgtgttagaggggcccactacccaggcccttacactgcggcagcctacctaagtatgcacagcgcacgtagcgtagaggatggagcccgcaggacacccttaatgcccttacctggcagggaggccagcacacaaggggctgggggcgggactgggcttcttggggttgagtggttctggaagccgatatgagcagcagcaactgctggcattatctaggctctaagaatagcttgggatgaagagtcagaggttgaggccagggaagaggacaggagcctgttcctactgccccctcctgctgcttggcctggaagctgggaagcctgcctcctggctcaccatttgctctgggatggttttgcatagacacatcttgtccaccactggactggaggaaagagggtacccctgggactcagacctaggctgcttgacctcaggctgaaggcagtgggcccactctctgaggaccagccctcacccaggcccctcaccactggcacagagtaggggtttgtatttttcaaggatcatgctggaagtgacccttattcatttagcaaacactttaaaaataggttatacatacacgatttaaagttcaaagggtttacaagggaaaaaaaatcactctgcctcccttccctggcccccagctaccaaacactgttaccagctttcttgggtgacttccaaaggcagtccatccatagataagcacacagatgcacaaatgtctctctcccccgatttttacgcaggagatggcatagcccatacattcttctgctccttttttttttttttttttttttgagatggagtctagctctgtcgcccaggctggagtgcagtggcacgatcccggctcactgcaacctccgtctcctgggctcaagcagtcctcctgcctcagcctcccgagtagctggattacaggcacctgccaccatgcccagctagttttttgtatttttagtagagacagggtttcaccacgttggccagactggtcttaaactcctgacctcaggggatctgcctgcctcggcctcccaaagtgctgggattacaggtgtgagccaccgtacccggccacaacttttttttttttgtaacctaatgatctatcttggaaataacagcaatgacatattgagtctccactagtgtcaggtactattctaagcattttagatggtttaactcatataatgctcatcacagcactaggaggtaggtcctgtttgtgaatctccaccattaagaggtttagtcattctccaagacttcgtgcctggtaactggcagagccaggactaaaacccaggcagcctcactttagatgaggtgctccttcctcactgctctgtgctgcctcccaagcttgagacatgttgagactcacatcatgccctccctcttcctaagggccaaggtaagccatgtacggtgaacacttaccacgtaccaggctgaggctgggctactgcagtgtaagggagaccaggcctctgtcctcatggaactgtcatcccagtgcccatgagtgtctgccagccaaggcaggaggagggaaacccacttgtctcatacccatgtgcccttgtataggtctgctgttcagacacaccctggtcccatgtccactagtcctgtagtcacaccgcctctgagctggaaggccttagagcccagagttacagatgggaacataggggcccaaacagaggtggacacgagagatcatcaggtggccctggtgagactcatcccctgcctcccgggatctatttcagcagggtgggtggggggtgactttaatccagggcccaaccattgtttgaagttggaaacaattgaaggacaagggagctatagatagatccacagctgctgtcacttgtcccagcctgggcactgggcctgagcattgtctacagaggggcactctaagcagtgaggcccactcctgggggtaggaggttggcccagcccagctcagctcagctcggctctagagataaagagtcagaggccaagacagaaatacagagtcttggaaggcagagagtgggacaggacaacatcgaaagaacaagacccttgagagatacgatggactcccatcaaatatcgacaatactcagactggctgggggtgggagggcagacgcagggcctgagccacaggttgaactcaaggatgcggcatgtcagagacctggaccagagtgggtgctggggtctggagcacctcagcccagctcaggtctttctgtccatccctccagaacagctgttcatgttaatcactcttgggggcagccagtctgaggtacccttgtgtgtgctcggggaggcctcaaggtcttccgaagtgagaggttgtgctgtcaggcctggtcatggcttgaattcactgtatgacatcaagcaaggacctgcctctctctttgcggctcagtttccccagctgtccaatgagagagctggttggcatgatggctgaagggccccttcatcctccaatgatgtcaggagatttccttttatgtgtctaactccctcctcttgctgtggctgaggtcgcagtcccctcctttctttgtcctttgtgaagatgggggacagctggttccccaccccctccccccagtaacctttcagccataaatccatgctgaggcatctctcctctggataaacagccctgatgccttttggctgccctcgtcctattttttgcttcaagcctcagagctggggcccacttgggccctctgcagctgcccagggccccaggaggggtacaaacctgggacaagcaggggcccaaccacccccagtgtgccagggtcgtgggcccctttctgggcctcaccaccttgcactgggaccattatggcagcctcctcctgagtccttcttcctgccaccggcctcaccccttcagtgcatcctccacaccagctgccacagggagcttaggaacacataaatctgaccacactgtcaaattccgtcgctcagagctctttgatgcaaaaaataaataaataaaaatgcctttgatggcgccccaactcctgcaggataaagctccagatctgaatctggcctttgaagcccttcacagtccagcccactacccagtcctgccccactcccctttatgcccctggtggcccagctgcagctggtggggctgcttgggcccatcttcaccccctaccctgccttggagttctaggtcatgctgtccatttcctgtcccctcttgccacctccatgccagacccatccgctctcacccgggtgacagcagcagctcgccccgctgcctcccctgccccttccaagccgttcaagtggtcactatgaaacttcagctcactcacatttctgctctcacaggctccctttgcacttgcaatacaaccctgggtcccttccaagtccttcaaggctctgaatgatctgcctgtccaccctcaccttggaaaactctccccttgttgaccactaggacggcaccttaaacatcccaagctgttttctgcctcatggctattgtatttgctgttccttctgcttggaatactgttccaagggcttcccgcctcaccggcttcttggcactctctggtctcaccttcagtatcgcctcttcagagaggccctccctcacccaccagaacgaagtacacgtaccccattaccctccaggccatacttcttgtttcatgcttaccacttgccacaatctttaattaccttaaaaatgtgtttgcttgtttattttttgcttctccaggggagtgtcagctctatgagggaaggaaccttgttgccatacccctcttcctggcagtctgggtgtcacacttgtttgttttgagtcagggtcttgttcctgttgcccacgctggagtgcagtggcatgatctcagctcactgcagtcttgaactcctgggatcaagcaatcctctcgcctctcagcctcctgagtagctgagattgtaggcgtgtaccatcatgcccagccaatttttaaattttttgtcgagacagggtcttgctatatcagcctaggctggtcttgaactccttggctcaagtgatcctcctgcctcaagccttccaagttactgggattatcataggtgtgagccatcatgcctggttaattttaaaaatatttttttgtagagatgtcacagggagcttacaaacacataaatctgaacacactgtcaaattctcttgctcagagctctttgatgcaaaaaataaataaataaaaatgcctttgatggcgccccaactcctgcaggataaagttccagatctgaatctggcctttgaagcccttcacactccagtcccaactgctcagtcctgccccgctcccctttatgccccagtggcccagctggtctcaaactcctggcctcaagtgattctcccaccttggcctccaaaagtgcagggattatgggcataagccactgcgcccagccttcaaactagcttttatccttcagactcctccgtgttgatgtcttccttgagtatctttcctttcctagacaatgagtgtcttttgttccatgtgtccctcccagctgtagaagcattattcacagagtccttcgatgtctttacccaaagaagaaattccaggcattgggttacattgagggcagatacattttgggctgggatctaaaatcctggagtctcgctctcctgaaatcggaacgaacttcaaaggtcatccagttcagaggcctcagccctggtcgacctctgcctgagtcttccttggtgctggcaggctcactttcctccaaggcagcctctcccgctgctgatgggctgagatggtgaaaagtccccttttgcatgcatccgcatcctgcttcctgtcgctgcccatggatctacttttgaggctacacaagtcacatcagctccctctgctccaggacagctcttcaagtttttttgattttttgttttttgagagggagtcttgctctgttgcccaggctggagtgcagtggcacgatttcagctcactgccacttccagctctcaggttcaagtgatcctcctgcttcagcctccccaagtaggtgggattacaggcacacgccaccatgcctggctaatttttttttttttttttgagacggagtcttgttctgttgcccaggctggagtgcagtggtgcgatctcggctcactgcaacctccgcctcccaggttcaagtgattctcctgcctcagcctcccgagtagctgggattacaggcgcctgccaccatgcctggctaatttttttgtatttttagtagagacagggtttcaccatgttgaccaggctggtctcaaactcctgacctcaggtaatccacccgccttggcttcccaaagtgttgggatgacaggcatgagccaccatgcccagccttttttttttttttttttttttaagtagaaacggggtttcatcatgttggccaggctggtctcaaactcatgagctcaaatgatccacctgcctcagcctccgaaagtgctgggattacaagctcttcaggtattgaaagtcagtatcttacttaagtccttgcaggttatagtatttgttgcaaatcactcagagcattgggtttcctctttgcgttgtcatgtttgtttgtgagcttatctcagcaggaagatgcaccctgggtggtggaagggaacctacgaggaagatctagacccattttgaggcttggtttctcagccccaggttcatacactgagtaggtaactctaggactcagacccacatgataggtgtaagttagacttgctagaggttctgattctccaggctaattctgttggtccctgacaagaaaccctaccttctgagcatccttgaacaatgaaaagaatttttcccactttctgggctttctataaattgctccagcccagctctccagcctctgatgccataggagattaaaatcctattatctatcaggtttggttcgttcacttactaggtatttattgactttctatgatgtgcaggcacttggcaaggtgccggggacacagaccaagctcctgcccttgtgcaggtcttttctagtggcaggaggtaggcaaggtacaatctaagctctacaaagagaattgaaacagtgaggttctcacagagacaatgcggagagaaagaagaaaggaatacataatgtaggattccattcaaacaaattctgaaaatagacaacactaatctctgaggttagaagtcagtattatattgtggatcaagcaagagtcggtataaaaaaaataaaaataaaaaagaagtcagtattctattatcctaggtgagggatggcccgaaggggataatttttcataatttctgtttttgtacagggtacggttttgttttgttgttgcttttgagactgggtctgttgcccagctggagtgcaatggtgtgatctcggcgcactgtaacctctgcctcctgggttcaagcggtcctcccacctcagcctcctgagtagctgagactacaggtgcatgccaccatgcctggctaatttttgtttgtttgtttgtttgttgtagagatggggttttgatgtgttgcccaggctggtcttgaactcctgagcttaagtgatgtgtccgcctgggcctcccaaagtgctggaattacagacatgaggtactgtgcctgacccagggtatgtttactttgagaaaattcatcaaactttataagatcattcactgcagccttgactgtaatggcaaaagactgaaaacaatcgaaatgtctaccgagaggggacccgcgtcatttcctaatggagacacactgtaggactaattcctaatagggtctgggcggctgtaattttgataaatatcgccaagtttggcactgtaatttttttttgagacggagtctcgtactgtcgcccaggctggagtgcagtggtgccatctccactcactgcaagctctgcctcccgggttcacgccattctcctgcctcagcctccagagtagctgggactacaggcgcccgccaccacctctggctaatttttttgtatttttactagagacggggtttcactgtgttagccaggatggtctcgatctcctgacctcgtgatccgccctcctcggcctcccaaagtgctgggattacaggcgtgagccactgcgcttggccggcactgtaattttaaatgtgttcatgtaatatgcacacagtaaagtgcatacatcttagatgtacagcttgatttgttttgcaaagtgcacgcacctgtgtctcatggctctactcagcgtatagagcatttcctgcctcccagaggctctctggtgcctccagccattaccctccctcagaggaccactctgccacttctgtcaccataggcgagttttgcctgttttgaatgtagatggttgaaaatgtagctgggaaattatttctctatatttcgtctagcacacctgtgcatttggaatgggagcgcatcggtcggaggacttcccgtgtgagcctggtctggcctctggctggaaccctggatctggaactccattgttccatgtgtctggcgtctgaggttctcagatcctttcattctcgattctaaaatcctgtggcgtcacggagccctgaatggggtgatggacaggagagcctggaggtgccctgacacattccaaagactgtatcaggcagatggactgccagcgccctgaacctctgtcgagagtgggccacgggaaggtggcttcctgtgaatcttcaatgtggggatctgaaggggctcctaactgggttacatttccttgatttgcttccatttcagccaaacaattccttgattctataagttccagggctggttttcttcatgtatgatttccccagggggtccccagaaagaggatggggagggaggaagagggaaagagggcatcgatgtgctcccacttccaaatgcacaagtgtgccagataaaatatagagaaataagtgcaaagctacattttcagccatatacattcaaaacaggcaaatctcgcctatggtgatagaagtggcagagtggacctctgaggtagggtacagagtggaggcaccagagagcctctgggaggcaggcgatgccctataccctgagtagagccgaggggacacaggtgtttgcgctttgcagatgtctgagaaggatgtccctctccccctacccctcccccctctctctctccctctcactccttctctttttgatctgttcttctccttctctctccttctctttttgatctgttcttctccttctctctccttctctttttgatctgttcttggccattgctcgtctgtgagacttggccaatgctttcctttctctgggcctcagtttccctggatgtatcaagagggttggactagctggtccaatctcagtaggcattctgtggtttcccctctgagtgtccttgctctctgtatctggaggtggggtatttttctgggtgtgtcagactctgcgtgacttggtttctccccgtgagctcttcagtctcctgaacctcttactgccttgtccctgtccccgtcagtctctgcacccagcctccctgtctctcagtggagtgtctctctccgcctttgtgatcccctgacaatgggaggtaaaaatagcccaggggccgtgctggtggagataaaagggaatttgccttttgtgtcctgtggccaggctgggggggctgtgacacgtggagattgctgacatagctctcctcctctgaccttgacagtggcaataaaaggggtagcagagcttcctgccctcaccgtggtgccgaggtaggtgatcagggctggggttggagccgaagggagggcaggagggtgggcgggtgggtgagggtgcccatgggtggccgcgagtcttctgaatctggagtggaggaagccctggtgtttgagggtgtgcatgtatgctgggcactcacccaaggaggctgcattgggagccagagggagtcgcctagtatctggtcttgtgggttgggggatcgtgccctagttcagctcccttgtcactgccatcttccagtgcctgctgccttgggccgccttgaacctccagggtttccagctcctcctccttcaccccagtgccactgccatgatggatgtgagtgaacttggggagtctgcccgctacctccgccagggctaccaggagatgacgaaggtgcacactatcccatgggacggtaagtggagacagagggggaggggtcatagccacagagatgcccttatggactcagaccaggaattgggaggggtggcaccagctcagggctgaaggggcattggggcctgacagctggagccctggacctttcctgcagagtctggggcctggaaattaaaaccccagggacactgtatatcactgtgtgtctgtgagcaagccttggtttgttcccctgtgaaatgggataatagcacctgccttccggagctgcagtttatgaagactcaggctggagcccgaggcctctgagatgagactgatcggcatgtgtgcaggctgcctccgcgtgtccacaaaacttgtgctggggttatttttagtggtttctgcagagccaaagccaccctttattagggacaggaataaaggctgtactatttatgacctggtttgctcataggacaatactaacaataggcagtgtgtaccgaatgcttattgtgtgtcaggcccagagcagatgactttccatgcatcatctcaacaacctggggaggtggggccagcaccagacctagcttcacagggcgccaggctaagagggaccttgtgtttgattcgacactctgctgttgccgtcttgaaagttttaattgttttcaacaaggggacccacatcgtcattttgtactggggtctgtaggttatgtagatggtcctagatggttctagatggtcctgacccaggcacttggcagagcaggggacacaaactccggtttgcagcctgagtccatgcttctaaccaccatgaaatctgggctcctcaaagctctggggacagctggccaggcaggagagcacaggttacagttaggaggcctgggtttgagtcttcagtgaaatagggaaggcaggacccctccctaagagtcatatgcctgatattgaggggctgctctgtatgggacctaaggagatctccataacattttgcatgtgagggaactggcccagagagaatcagggattttcctgaggtcagagggcaaatatggcggaagcaggaattggaacccaaccattaacccagactcatcctccaataaggggatctctagggaccctcccagctccgcccttcctgagcctgggtttggagggttcttcactggaactcctgggtcctggcagaggggctttggggagggtcacagctgtatggataccatggcttgggaactccagctagaacctggaggtgcctcagcccctctctgagtccagagctctctctgcaacccagggaagaagcgagtctgggtgcctgatgaacaggacgcctacgtggaggccgaggtcaagtcggaggctaccgggggcagagtcaccgtggagaccaaagaccagaaggttccgttccccctttcctgagattagcctctctgtccctaggcctcctggccaacaggatctgccctctggttgaagggggtctgggtatgtgggtgggggtgacaggtgaggtcggtcggttcctcccggtcccccggcccctgacacgatctccctggtaggtgctgatggtgcgtgaagccgagctgcagcccatgaacccgcctcgcttcgacttactggaggacatggccatgatgacgcacctgaacgaggcctctgtgctgcacaacctgcgccagcgctatgcccgctggatgatctatgtgagccccaggcccgggccatgggcggggtggggcttgtatgtggggcggggctagagatgaggtgctgggggcgggcccatagcggtggggcggggctgtgagcggtggatcggggctgtgaatgatagagcgggtccatagcgggggtggggctgtgagcgatgaggcggggctctgagcagtgggggcggggctggaggttgggccttgggaccttaggggagcagctgtagcagtgcggggcgggtctagaactcacctgcggactatggaggccgtgcgtgtgggctggggcagggctgtgagcacaagtcaggggtgaggccaggacggccacagagggtgtggtgtggcaagtcaagtagctccttgaggaatatcgcagggttcttctgaagactggggcctggggcctggggatgggaacttgcgtatccctcccaaaaccctacctatggggggagaatgtggtggcccatgcctgtaatcccagcactttgggagggcaaggcgggcggatcacctgacgtcagaagttcgagaccagcctggccaacatggtgaaaccccgtctgtactaaaaatacaaaaattagccggtcgtggtggcacgcgcttgtagtcctagctaccctgggaggctgaggcaggacccaggaggcggaggttgcggtgagccgagatcatgccgttgtactccagcctgggagacagagcaagactccatctcaaaaacaacaacataaaccctacctatactctctcttcagacctactcaggcctcttctgtgtcaccatcaacccctacaaatggctcccagtctatacggcctccgtagtggctgcttacaagggaaagcgccgctcagattccccgccccatatatatgcggtggcggacaacgcctacaacgacatgctgcgcagtaagggccgcctggactcctccccaaccgcagaccccgacctcggtcccgggaggcctctgtaagggacccccttcccccactggcactgccccccttttgacgctgctggacatggtcgcccagccgttctgtccctccgcatgggagctgacctccactagggacagccccacctgctccttcccattcctggctctgggtggtggggtctgccccagatggatacccagggtgttccacctgtggctggccccacaccttggctgacttctctatccccttccctttcctccagaccgagacaaccagtccatgctgatcacgtgagtgtggggctctgggggtggggtggaaaatgctggccatctggcagaaagagggcggtaccacagtcatttcccaggattgaatccaaagtgcttaggccaggacttttaccacctggagctagtgtcccagctgaagctaaattaggcctgagcactttccctgcccccattctgaacagatgtgttcttgatgggggatagggaggggacacccacaaacggagtgaccaccagccccacacctcctctccccggggcctggaatctcccaccttgatcctctggggttctaattctggctcaggggcagcggaaagattcctctgcttttcctcctttttaccatctacttatgtctgaatcttacctctgatctttccattgcctctgtgggaaaatggtagaataattcttacatgccaggctcatgtccagtcaggccaatatggacaatgtttagtgtgagtgtgcatgcgcgtatgcagttaagagcaagtgccttggccgggcacagtggctcatgcccgtaatttctgcactttgggaggctgaggtgggtggatcacttgacgtcaggagttcgagaccagcctggccaacatggtgaaaccccatctctactaaaaatacaaaaaattagctgggcgtggtggcaggtgcctgtaatcccagctactcaggaggctgaggcaggagaattgcttgaacccaggaggcggaggttgccgtgagccaagatcacgccactgcactccagcctgggccacagaatgagactccatctcacgaaaaaaaaaaaaaaaaaaaaaaaagcaagtacctttaacccagacgggcccggctgagtgtggtggctcacacctgtaatcccagcacttggggaggctgaggcaggaggattgcctgaggccaggggtttgagaccagcctgagcaacatagcgagaccccatctttaccaaaaaaaaaaaattgaaaagttaaataaaaaatcctacctaccacacaaagttatgagtcagtgagttgatatatgtgcctggcacacagcagggacagccacagaactcctgaggcccagttccttgttcctaaaatgggggtgataatggagcctgccttccagggttttctgagctgtaactgagccaatggagtaaagtgccgggcactgagttagtccgtagtggacaatggcatcatcgtgtgttgtcatctcacagggatggtctacactggcttgctttgtacacctctgagggttgatccatccttgggggtttcaagctggggggaaggagaggtggagggctctgcttgaggggtgaggcattgggggtgggggagaattaggccagatgggcattggtgactcatgtttgtgtcgtccaagcggagagtcgggggccggtaagacggttaacaccaagcgggtcattcagtactttgccatcgtcgctgccctgggagacgggccgggcaagaaggccgtaagacttgcccactcgggcatgctccccgttgcttctcgctgtttttcttttctttcttcctctcttttttttttttccccctttttaaaaattttactccccagaaccctgagccctgcctgagcctcccaccctggtgggggactctggcctgagcaaggcttgaccacaaaggctgtggccacctgacgcgcctgccttcgccttcccattggtaaacatggaggggtggggccacgttgccgtttctaaatttgtgtaatttttatcttccattgtgaccttcatatattgaaagagtttactagatgggctgcttttactaagcgttgttgtcttggtttccctgacagttacctgctgctgacacattagacacagaggttggctggcatgcagggcactgggcattcccagcagccggggttggcagggcaattttgtgccttgtgatttctgtacagtttttggaaatttctgaaacaatggggccaagtttttttgtttttgtttttaaggcataacatttcatccctagccttggggccagttgttcagagccctgtggctacccctagatgggctgcctttttccagaagcccgaggcctccctccccacccagtccctgctcctggtcctgttaagccttgctttattctgggtgtttttcttgtttttcccctgttttctttctttctttcttttctctttcttttttctttcttttcttttcttttctttttttttttttttttttgccttttcctttttacccatttgattgtcttgatttttgattttcatttcagttttgttttgttttgtttttgctgttgactttttggtcctttttcctccttccctttcctgccctgtcttccaaatccctaaaaaggtctctggggacgtaacagaaagttgggtgggtcaagtgacaggaagagatgtcagggagaggccagagctggcagggacacagctggaagggcagaggagcacctgggcagaaaggagctgggacagtggagcccaggggagagggtcgggcaagggaggggtgggagaggctgcccgcaggagccatggctgcaggaacttaaaagattgatcagctccccttaccttggccccaaatttggccaaacgggctagagagagccctgcacaaaagcactggatgggagtgtattggggggttccacctcccctgcccaatgtccctgtgggtattttaactcttgggctccctggaggtgaatgaatgaccacaaagtccgtggtggtatatctgttccctccagaatccattccttcccttctctccctttcttccttggctcccagcatccggagtagggaagagaaggaaaggaaaaggaagggaaagtgaggatgaggctaggatggggagaaggaggatctgctcaattcacttagtccccctgggtgacacacaggaccgctgtggcgtccaggcggcaggatgctgggcacctgccctgccgctcctgacttgctgtgtggccttgagcagatccactccctgcccagagctaagtctcctcatttgcaaattagggctaataatgggcacctggcagggcctttgtgcgcactggtaggtatacaggcagacaaacaatgaagacacacccagttgcattacaaaggagaggtgtgtaaggtcatagtgggaggttagggcaggaaggttcagaccaggaagaggtctattccagctttggagcagccaggaggccttcctagaggagggggcacttgggctgggctctggagggccctagattttagtcgggaggcccctggggcttggagcagggccactgcatggagactagaaaatgaagggaggccagaggccgggctggggcagaggaggctgcaggtggagactctggctggggctgtgccactcccactttccagcattttgcctcctaacagctgcaggagggtcaggccgaggggctgagggtgggggccatgcattccggtgactaactccacccccctgtcctgctgcccgctgcctcccgctgataccctgccccaccccgcccttccccaccggaggcctggccctctaatgttgtctgtcttcttcccccagcaatttctggcaacaaagacgggggtgagtatggggccaatgtcaatggggcagccctgggggtacccccttcctctgcacaacagaggggccacgggtggctctggcctcccggtgggtaggcaccagaactgacagaccccctcacccccaccgccccagggcacccttgaggatcaaatcatcgaggccaaccctgccatggaggcctttggcaacgccaagaccctgaggaatgataactcctcccgctttgtgagtggctgaggtgggaggggtggcggggatgccgtaggccaccagcggcaggtcgggcacaggtggggacagtgctggctgtgccccttggctgagggctgcccctctgcccacagggcaagttcatccgcattcactttggtccctctgggaagctggcatccgcggatattgacagctgtgagtcaaccccctgcgggcggtgcaggggaaggaggcctgagcccggtcaccccaactcggcctctgtcatcacgacttctgggctcctgcctgctctgggcacttctctctaccccctggctgctgcccagctcaggccacctcacctatcaccagaacatcaccccagcctctgcctggtctccagcttcctctcctctacgcggccatagttttgctggtcatatcctgttcctgcttgaaagctttctctagatcctgtcacctgaggatggagacccaaatcctcatttggccagtcaggctcctgtgactgcacccctagcgtgtccccagtcttctctctggccaccaagagggcaggcctggcccacggccctcctgccccagctgcacagctacacgtagagtgccccatccttccaggcaccccgctgggaagtgccccagtaccaccagctgcatagaccccaggcgcctaggccacactcaagggggccagggacacagaggggcccccacgttggccactccccacattgggctgcatggctaggtcttgacggatgagcgcaggcaggcagtgacggggacagggataggctgtaattcacaccctgacccctacacagacacacacagacacacacggaggctcggccacacacgcacacacgctgacacaccaacagataaaaacctgcacacgcagacaccacactcaccccacacacacgcaaggacacacactgacccatctggccagagacacagacacacaggtacagacacacggctcgtgtgatgacgcaggcacaggggagataccctccccacacaagctggcaggtgcagatgcagcccccctgcacactccctgcccacctctctccctccgcatcgcccccttgggatgtccactctggggaggtgtgggagatggcaggccagcgtcccttctccccagatctcctggagaagtcgcgggtgatcttccagttgcctggtgagcgcagctaccatgtctactaccagatcctctcagggaggaagccagagctgcagggtgaggggcagtacgatgaagggggtgggagtcagaacctggaggggctgcctggcgcttcctggcccccatcaggccaggccctggtggtctttccctccctgtcctggggtctgtggcctctcttccttcttgggacttttggttactttcctgctagggaacagtcctcttagctccagcaacctgccaacgtgttatcgctgcctccaggagcctaagccctaaaccccacttgctgtcctgagactagagaggtcccacccagcaccaaggcggactgatgactgtctaggcccagctctcctctctggcaagcccgttgagggcagagtctggtcttccctgtgcgccagcatctagcatgggatctgggccagagggggccatgagcaacagtcaaaagatgagtgagacgtgaggactgtggctcattcctcagagaaccagaaaaagaagccagggtcaaagtgaaggccaggtcagggcccttcactctcagtgccctcagccttggcaggagtgaggatgagaaacttaggccccagactgggagatgaggtcctctgggagggccctagactcctgctgggcttgcccccgcaggaccccctatgctgcaattgttgtggggagaatagccggtaagcactgcctgaccctcccttctctgccctgtgtccccagacatgctgcttctgtctatgaacccctatgactaccacttctgcagccagggcgtcatcaccgtggacaacatgaatgatggggaggagctcatcgccaccgacgtatgagctctggtgggaggggagctgtgtggacgcctgtggtggaatcgggcagcactgccggtgcccccagctgcatgaatggtcccggggcagtgcctggctggaccctggaggagcccagacctctctgaactcgctttccctgctgccccccagcatgccatggacatcctaggcttcagcgtggatgagaaatgtgcctgctataagatcgtgggcgccctcctgcactttggcaacatgaagttcaagcagaagcagcgggaggagcaggcggaggccgatggcactgagagtgaggggccctaacctggccttcaacttgacccagacctcagcatcctgtccatgatggttaaccccaactcttgtccacaacctttaacctcagtcttacctggccctgcctcctcagctccaaacccttaccctcctgaggctttgtttgctagccctgaacttgacccctcttaacttccctctcctagccccaggctgaggcagtagagcccctgagtgcgcatggtggtgtcctcctcccttaccccactcgtgccctgccaggtgctgacaaggctgcctacctgatgggggtcagcagtggggacctcctcaaaggccttttgcacccccgggtgcgtgtagggaacgagtacgtgaccaagggccagagtgtggagcaggtgagctgcctgcaggccaaacccatgggggacagccgggcagggtcccctccttgccaggtcccagcccagcctccctgcacctccaggtggtgtttgctgtgggggctctggccaaggccacctatgaccggctgttcaggtggctggtgtctcggatcaaccagaccctggacacaaagctgccccggcagttcttcatcggggttctggacatcgctgggtttgagatctttgaggtgaggacaggccctcaccttggcctctgttctctccaaggtagaggacatgggcctgtgggggggcagaagccctggccttctgcctggaagttgggggtgaactcatgcccctccccgggcctccctttccccatctgcgagaggtctgctgagccaggcccctccctcttgtagttcaacagcttcgaacagctgtgcatcaacttcaccaatgagaaattgcagcagttcttcaaccagcacatgtttgtgctggagcaggaggagtacaagcgggagggcatcgactgggtcttcatcgacttcggccttgacctgcagccttgcatcgacctcatcgagaaggtgggtgccgcggcaaggtcactttgaggaagggagggtgtgtgtggtgagcaagcagggatggatgaccatggcttgcatggaagcctgcaagtgtgcatggaagcgtgtgactgtgcgttgcagtaagcatgcatgtgagtgtagttgtgacagcgtttatgtgcttgtgtgtgaaagggcacgtgtgtgagtgggtgtgttggagttgaccatgagtgagccttggtgagtgtgtgagcagtgtgaatgcatgcatcccagtactgtggacaacagctcctcctgggtgctcagaattctgcagctcacaaggccctatttgcagccacaatttcactggatccctagaactgccctgggtgcagggcagggtgtgtttccttgtttttgtgattgtggaacattatgtatatttacccattgtacaaagaatggaagaaagaaaatttgaaaaattggcaggggaaaaaatgtttctccccattcctatcacagccagtcacatgacacttaggttcatttcctcgaaatcctttatccctttttttttttttttttttttgagatggagtctcactctgtcgcccaggctggagtacaatggcaccatctcagctcactgcaaccttcgcctccagggttcaagcaattcttatgcctcaacctcccaagtagctgggattacaggcatgcgccaccacacctagctaatttttgtatttttaatagagacatggcttcaccattttggccaggctggtctcgaactcctgacctcaagtgatctacccaccttggcctcctaaagtgctgggattacaggcgtgggccactgcgcctggcctatccattttcttttatagacacagatttcatttcatatcctactttttctctgaaaatgtattttgaatgctgctcatggcaagagtagttcatgcagtggatgagtttcatacgatgcatttctgcagtcccctacagctgggcgtttaggtgattgacagctttttaaatattatgtcagcactgaagacattcatcttcccactctgcaggttagaagactgaggcttagtgatgtcggagggccccacagctagtgagtgaggaagccaaaatgtgaacttgatggctttttttgacttaccccatgtttgtgtgtgacagccatggctgtggcgggggtgagagtgggtacagagatgccagcttgggtttgccattgttagaagtgaagatgacacctcagtgctgcagattttgcaggaggggactggagccaagccacaaacttttctctgttaggagatgggttcttggagtgggtgtggtgtctgaccatccggggagatggctgaagctggggatctgggaaggctcccagaagggaggtggcctggggaaccaggggttcagtccttccaggatggactggcttgatggtggcttttcaagctcgttctgttcccagccactgggcatcctgtccatcctggaggaggaatgcatgttccccaaggcctcagacgccagcttccgggccaagctctacgacaaccacgcggggaagtcacccaatttccagcagcctcggcctgacaagaagcgcaagtaccaggcccacttcgaggtggtccactacgcaggcgtggtaggtgcttgctggaaccccagccctcggccaggctcctcccgccctgctccaggtctcccacccgggctcagcacctgacttgtctctccaggtgccttacagcattgtgggctggctggagaaaaacaaggatcccctgaatgagaccgtggtccccatcttccagaagtcacagaataggctcctggcgactctctatgagaattatgcgggctcctgctccagtgagtatggagggacaagatctccactctgacaggggcccacagagcgacattccctggagtgaccaggccccttgtctctattagctgagccccccaagtctggggtgaaagagaagcgtaagaaggcagcatcgttccagacggtgtcccagctgcacaaggtaaggccccatctgggagacagaccctccctcttggcagcctccagccccgtccttcaccccctgccctgtcccctgtgccttgggcgggcggctgttaagacttgcagtgatgtttaactcctctccacgtgaacatcacagcaagtctgtgctgcttcccgtccctacgctgcctgggcagggtttgtggggaaggggtgggagccctggggctctgggagggacggggatttggcagggaagtgaagactttggtggtggtgatgggagacagcgaagggtctcccatcaccagaatgagagtgaaagagcaaaagtgcagggcacttagggccctgctcccgtctcggtcctgaccactgcggcatccaattctggttctctgccccctttgtgcctttccctcactcttccccactgccaggagaacctcaacaagctgatgaccaacctgcgggccacacagccccacttcgtccgctgcattgtccccaacgagaacaaaaccccaggtagtcacccagggctggcctggctggggccgggaggcatcatgggaaggtgacagggcagaggccgggaggctgagtacatcttccccctcacctcgcagggtctccactgctgctttttctctggggcctgcgggtgtgcctgttgacctctgaccttttcccctctcacgtccaggggtcatggatgccttcttggtgctacaccagctgcgctgcaatggggtcctggaggggatccggatctgccgccaagggttccccaacaggttgctctacaccgacttccggcagcggtgggtgaccccttccccctgcctgctgctccaggtggaggcctgaggggctgggcaggacacacatatcagagcccaacagacggtcccctgtctggagggggaagcagggactgtgaggggcctggccaggtatcccagcaagacatgggggtggctcagacctggccggggacttggggagaagtgaataggcttggggcaaatagtggaggtggagcctacaggcctcgctgataagctggacatggaattctggatgcagaaaagacgaatgatttctagttttgggagtgagcaacctgggagctaccagtggtagatttactgagctacaaaaacagggttttttgatttggaggagaggtgaagggatactggtttgagctctgttttgcgtgtatcaggtttgaaatgcctccagcagacatcctagaaaagtcatgggggagattgggattatcaatctggagctcagggcagcgggcagaaaggatgcagatttgggagttgaacgagaatcatgtggacgaggcttcatgagacacctggcacatagcaagcacctgggcagtgctgccagctcctccccgttccctcaatgggcaacaagcatccatcgttccttctccctccagaagtcatggtgtcatccacactatcctttgtaaacagaggttcacacagataccatacacgcacacacacgcatggtgctgtgaccttgttttttctaacagtctggcctggagatcgttccttatccccaggcgtatgcctgccatcgtcatccgtttttcttggctgtgaaacatctcacagtctggtggactgcatgctttgtttaatgagtccccctcatgaggggccttcacagcgtggctgtagcccacctgacccacacagccctgtgcatgtgtccacttagaagtgggcaggctgggagccctggctcttttgcattagaatttccccccaaatgggctgggcgcggtggctaacgcctgtaatcccagcactttgggaggccgaggcaggcggatcacgaggtcaggagatcgagaccatcctggctaacacggtgaaaccccatctctactaaaaatataaaaaaattagccgggcgtggtggcgggagcctgtagtcccagctactcgggaggctgaggcaggagaatggcctgaacccgggaggcagagcttgcagtgagcagagatcgtgccactgcactccagcctgggcgacagagcgagactccgtctcaaaaaaaaaaaaaaaaaagaattttcccccaaatgtttcttcagtgatagggtacagcatgtcaccttctactaatattttttgcctttaaaaaaattttaaaaatagtgcatgccttctgtaaaaagcctctttaaaaacttaatgaatgcatttaaaatccccccaaggttgtgtttttttttttttttttgagacggagtcttgctctgtcacccaggctggagtgcagtggcaggatcttggctcactgcaacctctgccttctgaggttcaagcgattctgcaattcttctgcctcagcctcccgagtagctgggattacaggcgcccgccaccatgccccactaatttttgtgtttttagtagagatagggtttcaccatgttgcccacgctggtcttgaactcctgggctcaagcaatccacccgccttggcttcccaaagtgttgtgattatgggcgtgagccaccgcacccagccaaccccccagggattttaagtggagtgtccctagtgtcccagtgtggtgacgcatccctggcccccttgtttggcatgtgccctgctggaacctctgcaccagcctcggagaggcccaggaacgagtcccctgctacccacacgagcctcctcagtccctgacttccccattctcagtggcctgtgccccatacccagccctctcctgaccagctctgccctcctttcccaggtaccgtatcctgaaccccagtgccatcccggatgacaccttcatggacagcaggaaggccacagagaaactgctgggctcgctggacttggatcacacccagtaccagtttggccacaccaaggtcggggcactgtgggatcagggctggccatggctgtggcggtcacactgggcagggttcatgcggatggttgggggttaccctggctgtctacctctccgcccccaggtgttcttcaaggctgggcttctaggcgtcctggaagagctccgtgaccagcgcctggccaaggtgctgacgctgctgcaggcgcggagccgtggccgcctcatgcgccttgagtaccagcgcctgctgggaggcaggtgggtgtgggaaggaggctggggacagggtgtgtcccctgcctctcagctcccagacccactggctctcccaaccctaacatgctgccctgtagtcagatcagcccctgtggctggttggggcaaggttctgttctgtgtcccccagcctccatttccccacctcaaaaaacggggtacggcacttgcctctccatttcaggacatcagcgtgtggcccggaggggtagcgatggcacccagtgtcttccaagactcttgcgggccgggccccaggcaagatactttctctgcattatcctggttaaagcgctgacggtcctgagaaacaggcgctgtgatggcctccactcagcagaagggtgcccgtgtcagagatccagagctagctggcacgtcagcccaggccgctgactccagagccccgtggcttaacagccctggtgtcttccgggaattgcagaggccaccaggacatggggggctcatgagccccttcactggaggcaggcctgtgggactgtgggcctcccctcaccctcacctataaagcagagctattaggagctactccatgaggctgctgggaaggcaaaacaagtgaactgtgctgagtgtcaccatttgtgacgggcagcactgagccaccttcacagcttggctgcccctccctagggatgcgctgttcaccatccagtggaacatccgtgccttcaatgccgtcaagaactggtcatggatgaagctctttttcaagatgaagccgctgctgcgctcggcgcaggctgaggaggagctggcggccctgcgggcagagctgcgggggttgcgaggggcgctggctgcggccgaggccaagcgccaggaactggaggagacgcacgtcagcatcacccaggagaagaatgacctggccctgcagctgcaggctgtgagtcagggttccccttgtgaccgggcgtccccagccccgagtacccctggctgctctgagggatagtacagcgagacccatggggctcaggccttatgtctctctgttccaaagatgccatgagatgaggcctccatgtcccagcctcaccaccccaaggcctcgtctggcacgtttcctggcactctcccctcgtgccaccttggcctcccgctaaagcagaggaaccccagctccccagctctcccctccctgcaatccctgaaaccaaacagacccatgctctcttctctggttaagggccatgggaacccaggtggcaggtaacagggtgatagccagagagcacagatcaaaggtctggaatctccccaggtccacagagcaagctttcctgccttcggcacatggctttgtgtatcaattgtgtgccaggctcaggctagtgcaggaggaacgttggtgggaagacagagatggccctgtggtcacaaaactcacctgctagtgcaggagactgtgacgcagctggacagtaaggaaatggggggtaaggatacctgagcccttccagggactgcctccaggagcccgtccgtggctgtgcagaggctgctgctgctcaccctgcccctcggaaggcctcagcccaacagcggggcagtgagcagcgggcttccctctcagaacccttgtttgggcctcactctgggccgccccgcacttctaactttcccctcttaatgctctggtgtgtccctctgcgctattgcccttccatgcccaagagcgagtcaagacattcctgagttctcagagcacagccaaactttgctacagaggcagtttcctctccagggcctggcctggtgtctctctgctggtttacctggccctcccccaacctggccccgttccgtgtgccctccaggagcaggacaacctggcagatgccgaggagcgctgccacttgctgatcaagtccaaggtgcagctggaggggaaggtgaaggagctgagtgagcggctggaggatgaggaggaggtgaacgctgacctggccgcccgccggcgcaagctggaggacgagtgcacggagctcaagaaggacattgatgacctgaagctgacactggccaaagctgagaaggagaagcaagccactgagaacaaggtgtgggccgggccagctgtggggaagggccctgagccaggggccagctttggggccaggtggctgcaggtcccaccccggctctgctaagcctctgctttctggccctgggcatgtcactgcctttcctgggcctcagtttctttatctgtcaagtggggttagcagcacttaccccattagggtaggtggtgatgtgtgtaattggcctttactgagcacacgctcctaggccttgcacacggtaggtgtttagcacatgctggcaatcctcatccatcccggagtgcaagccccttgagggcaggaactccatgtccccagctcggcatcccgcaggtgacttctgcccttgagccctcgtgatggcccctgtggttcccagtgctggaggagggactccattacacaggagggaaagtgaggcaggggtaggcagcttaggttctcacaggtgctcactgaggaagccgggactaggaggcagctgccctgagcacatgctaatactgcacatggctggcatctgtggatttctcaccaggccaggtgtggtgctgagcactgcgggtgcatccactcgtgaatcctcattacaaccccatgaggagggtccttccctcaggcagaagcggtggaggctcggagtcaagtgacttgcctgagtcccatagctggaaggggcacttgctctgacctggtgtggtgtggtggccgctcagagtgcggggaagggcgtccccattctggccctggccctggcacaggtgaagaacctgacggaagagatggctgcgctggacgagtcagtggcccggctgaccaaggagaagaaggcgttgcaggaggcccaccaacaggccctgggtgacctgcaggccgaggaggaccgtgtgagcgcgctgaccaaggccaagctccggctggagcaacaggtggaggacgtgagtcagggccaccccgagactgggtggcggggccggggtgccggctggcttgggccatggctgacccctgctgtgcctgctctgcagctggaatgctccctggagcaggagaagaagctgcgcatggacacggagcgggccaagcgcaagctggagggtgacctgaagctgacgcaggagtcggtggctgatgctgctcaagacaagcagcagctggaggagaagctcaagaagtaggtgtggtggggcagcaggtgggggccttctgagcctgcacctggcccttgttcccttctggattcttgtggttcctgcggcattgcagaggttaagggtgggggttgacagatggggcactggggtgcaggggtagtgtcttgccctccctgtactgagggccctagccagggtccagggctgaggcctcagggcccagtgcagcaggtgcatggggtgaggtccctcagggcctgaaggggactggggggcgttatggggtcccaggcgggtgggtgggagttaaggcctgtgctggccacccactctgtggctcccaggaaggactccgagctgagccagctgagcctgcgggtggaagacgagcagctcttgggggcccagatgcagaagaagatcaaggagctgcaggtgcgtggggatcgggtgggtgaggcctggggtcagaggcccacagaggtgacagctgccccacgtgcccaccccaggctcgggcggaggagctggaagaggagctggaggcagagcgggcagcccgggcccgcgtggagaagcagcgtgcagaggcggcgcgggagctggaggagctgagcgagcggctggaggaggcaggcggcgcatccgcggggcagcgcgagggctgccgcaagcgggaggcggagctggggaggctgcggcgggagctggaggaggcggcgctgcggcacgaggccacagtggcggcactgcggcgcaagcaggcggagggcgcggcggagctgggggagcaggtggacagcctgcagcgggtgcggcagaagctggagaaggagaagagtgagctgcgcatggaggtggacgacctggctgccaacgtggagactctgacccgcgccaaggtgtccgtgccttcctcaccccatacccaccctgactttaaaccaatcccgatcccagcagccaatactgttcccacaccagcctccacccagtaccttatcctgagccctgacctcttcacctggtacacaaccctcatttctcagcctcctaccagtcctgaccttaagccgtgactcccaagccctgttccctgactccaggtcatttctgatccagcatctacttccagcctcagacccttgaaccagcagtagttgtgaccctagcccttgactcctgaactctgacttaatacctgtcctctcttcctgtcctgaaccccagcaccctagccttaacccctgacctttctaccacataatcctgacagctgacctctgaccattgtccccaggtgactccgcagctaccatcccaactctcaccctgacccactgccctgggactggcccagccctgtcagttctgacacctgttaagcccagcagtagaatctctttccctgactttgaacttggggctctgctctccctttgattcctgggcccacatctagcttaccagtctctgatcccagatcctgccatctgatgcacaaacttgttctgacatctaactcctgacccctgactcccaacctgggatcctaggccagtgcagagaagctgtgccggacctatgaggatcagctaagcgaggccaagatcaaggtggaggagctgcagcggcagctggcggacgcaagcacgcagcgtgggcgactacagacggaaagcggtgaggctggggctcagctggccacaccaggcagggctttggtgcagccctcaccagcctgacctgtccgctcgcctctttgcctgcaggggagctgagtcgcctgctagaggagaaggagtgtctgatcagtcagctgagccgtggaaaggccctggccgcccaaagcctggaagagttgcggcgccagctagaggaggaaagcaaggtgggctggcaccggtgaccatggagtgggcaggtgggcaccagagccactgggctgcactaacgctgaggtcactggtgtccctgcaggccaagagtgccctggcccacgccgtgcaggctctgcggcacgactgtgacctcctgcgggagcaacacgaggaggaggctgaggcccaggctgagctgcagcggctgctgtccaaggccaatgccgaggtggcccagtggaggagcaagtacgaagcagatgccatccagaggaccgaggagctggaggaggccaagtgagtgctttgctggccaggccactgccatgcagagctttatgcctgtgcctgagccccgctgagggtgggtgaagggagctgctggggctgttctccctccttccatggtccacaccttgtctggttccatggcctagaaaaaagctggcactgcggctgcaggaggcagaggagggcgtggaggctgccaacgccaagtgctcatcgttggagaaggccaagctgcggctacagacagagtcagaggatgtaaccctggagctggagcgggcgacctcagcagctgctgcgctggacaagaagcagcggcacttggaacgggcactggaggaacggcggcggcaggaggaggagatgcagcgggagctggaggcggcacagagggagtcccgtggcctgggcaccgagctcttccggctgcggcacggccacgaggaggcacttgaagccctggagacgctcaagcgggagaacaagaacctgcagggtaggacctgccacacgccagggccagggtgctgccctggggtcggagcaactttgagttatgggggtgccctggtggggccaccctggaatcaggggtgagtggagtgacctgggtgggagtacaagccatgggggtggcctctcagcaccctgtccactgcagaggagatcagcgacctcacagaccaggtgagtctcagtgggaagagcatccaggaactggagaaaaccaagaaggcgctggaaggcgagaagagtgagatccaggctgcactggaggaggcagaggtcaggggctggctgcaggggtgggtggacactgacctgctgctccactggccatcccccccccccaccctaccctgcctgctctgtatccacagggggccctggagctggaggagaccaagacgctgcggatccagctggagctctcccaggtcaaagcagaagtggaccggaagctggcagagaaagacgaggagtgcgctaacctgaggtgtgtccatccttctcccgtccccacctcccgagagcagaaggggagggaagcagtgtgtactctgctctctagtctgtccctcccatgggactttgaggtccgggttgctgtctccattctagctgtgaacctcggagatgctaaaggacttgcccaaagtcacacagtgggggtggagccagtcagtccacctctgtctgcctgggcctcactcttgtccatgaacttgctctgatgggccacaggcagtcacaagagactttaaatcggggaggggtgactcatttgttctcaaaatgggttcgtttccaacggtccttgggcatttgtaaggacaggtatgcccttacgagaccccctttcatgccaccctcctcccataggcgcaaccaccagcgagctgtggagtccctgcaggcctccctggatgcagagacacgggcccgcaatgaggcgctgcggctcaagaagaagatggagggtgacctcaacgacctggagctgcagctgggccatgccacccgtcaggccacagaggcccaggctgccacgcggctgatgcaggcacagctcaaggaggagcaggcagggcgggacgaggagcagcggctggcagctgagctccacgagcaggcgcaggctctggagcgccgggcctcgctgctggctgcggagctggaggagctgcgggctgccctggagcagggcgagcgcagccggcgactggcagagcaggagcttttggaggccaccgagcgcctcaaccttctgcattcgcaggtggggacaggagtccctggggacagagcaggtgcaggcctgctggctggctggctctgagactcctcttcccctcagaacacaggcctcctaaaccagaagaagaagctggaggcggacttggcccagctgagcggggaggtggaggaggctgcacaggagaggcgggaggctgaggagaaggccaaaaaggccatcactgatgtgaggctgggcaagggctgtggggagcctgggacagaattgcagagggacttccctgaggctgggcacctgaccagctcctcctccccaacaggcggccatgatggccgaggagctgaagaaggagcaggacacaagtgcacacctggaacggatgaagaagacgctggagcagacggtgcgcgagctccaggcccgccttgaggaggcagaacaggccgccctccgtggcgggaagaagcaggtgcagaagctggaggccaaggtgtgtgcagcccctctagtccttggcgcaggcagggtgggtgacccaggggtgggcttggcatcaggctgtccccctgcctgcaggtacgggagctggaggctgagcttgatgcagagcagaagaagcacgccgaggcccttaagggcgtgcgcaagcatgagcgccgtgtcaaggagctcgcataccaggtgggcgacagggtctccctggggagtggccctggagctggcccagcccaagcaagccctgagtcccccttgcccgcccaggccgaggaggacaggaagaacctggctcgcatgcaggacctggtggacaagctgcagagcaaggtcaagagctacaagcgccagtttgaggaggcggtgagtgcgctggggcctggacacctggaccgggcaccccagctctgccccagggtctgtggccaggtgaggcatcagcagcagctccaccctccaaggtcagtgacccagagggaagagagaagcttctaacatctctggggagatcagacctagctccttctcatggaacagaccccatgtgctttcccctggccaaggctggggctgcctctgaggggtggggcaggcacaaaaaggcacatgaagttggtgcgtcccaacttccttattcccgctgtggtattggtgaggatggacagtggcaataggaacaaagttgagaaccaggaggagctagctcccttcttggactggggcagggaccagaataagcatctcagtcacccaagcggaaccaaggccctgtgtgtgcccccaggagcagcaggccaacaccaacctggccaagtatcgcaaggcccagcacgagctggatgatgcggaggagcgggcagacatggcggaaacccaggccaacaagctgcgggcacggacccgggacgccctgggccccaaggtgaggagtggcaggggcattgctctctgtgcagggggactgtgggggctgacaggtagtactgctcactcagctatccctttctcctcagcacaaggagtgacggcctgaccccctgggctctaaagaggaatgtctgctgttgcacatctggctgaggccacctgccccgatcctgccatctctgcatcgccccctgctgccttcagccttccctgggccctgaataaacaccacagccagtttccttctcattcttttctttggggttcaggaggaaaaacacagtcctagggacaaaagccaggtccacagcagtcatttttaaaataaagttatttaatagtctccatttaattggtttatttgctgttaataaattggcaacacaaggaagggccccatgtccaggctcaggcaggagcggctgcctcaggcagaggcagggcaggcacagctgccccgtgccccaagggatggagggaaaggcccctcacttctgggagaacccccttggatgaacacagcggccaatgagcaaacagaaccagaggagctacaggaaaatgaggcagaggggcaggcttgggggaaggcagcattctctggtacccaccacccctgcccagggctcagaagcctttgcctgggtccaaaggccagggacaagggaggcttggctcacagatggggggtgggggtcacccatatcttcctccccactctgggactgactgacagccaagaaaccggcaggagctcacacagagctaatgctaaatgtcctcttacctctgggtggccctgggccccagggttctgaaggaaaggtgggcatggtaccctgtcctcattatggggactgaggctctccatgacctagggccctcagacccagggggaccaagggcttctaggacttccctcccaccaagcctgtacccaaagacctggggcaggcagagagcagcagggaggaacgggaacagggcagggcgtgtggcatcgtacccacgctcacccacactggcccagcagcctcccgaggcctggcccaaggtcactcctcagtgaagtccctgtctatgtccatgtagggctcctcaatgtagctaacgagagcagagggtgactgccggtccgggttcaacaggatggacactgtctccttccagtatgagaagctgatgcaggagctctgggcaaagagggaggggctggggggcgcctggaggacccaggtcaagcccagcaccgggacacccctctgagaggccctgggtccgcggcccacccatcacccccttgagggtggggcactcacgttctctaggcaggtgctgtccttgtccttgtgcaggtagtgctgctgccagaagcgcagcaggttgtggaagttgttgagcaggaagccggggtacttcttgctgtgctccatccgctgcagcagccgcaggtacaggggcagccgctctttccgtcgggccagcatcaggatcaccaggctggtgttgaggcagctgacgttctcctgcaaggccacaggcccacagggtcaggggctggtgggagccccagtggcccctggtgaacctgggtagccatcaggcagggaggagagtggccccaggcctcgggccacccacagagctctccctgcacagaggtgagataggactgggggaagggggcccccagcagccccagtttcctgactgagcaccttcctcttccccacgcccacctcccaccccacctgaggcaacaacacctgtccctgtccagacctgggctcaagcatcactccttccggaaggtccgtcccaggcagggctgggtgcgtgtgttggggcggttatcccgcttcagaagtgccattcagcactagcctgcgcgcctcggtggggaaagagttctgccccactcaccatgcactcccacctggtgcttcacctcagaacggaaccaaagaccacctctgagaggtgctaagatcaccctcactctagaaaagaggggcaggaggctcagagaagggaaggctgcatgactattcagtgagggagttgggcagcctcaggtccgattccaaagcccagcagggcagaaggtgtgagggacgtggacatgggggaggcggggagagcactggcctgcaagtcagcctgtgacctgagggcacttgcgagccctccttccttaggccctgtctgtacaatgggacactgattcctcctgagcacagtcctcagaagagctgggtctccagagacgcacttctggagtgggggacagaaacctgctgggcaccaggacaaaggaagtggtttccaatcgaccttccctgctgtgtgtctgccggggcctctcacctgggtcagcgtctgcacgtggatgatgttgatgaggcggaagaggaaggacatctgcgtgggcacctgggatatgtaggcgagcaggcggcattcagacagtacctcggcaactgtggagggaggcaggggtgcagcaggtcaggcttaggcccagtggctgggtcgcccaggcctttcgtggagccccgcttgggtcctgactctgaagctaggagctcatcatcaaaacagcttcaacgaaagctgactgtggcagaaagaaggacctccagctgtcctgctaccaggcaaagccatgttctcagagtgcccaggagcaccccacctcatcctccagaaccaagctcagggcagctctccctcagccctccccagactggctccagacccgtgccctccatatcacacacagaagagttccctccacaggaagatggatccatgacgctgcattaagaaaaacaacgcaaaagttccactccttctgcagaggtcctagcgcaactggttttccacaccagctctcaggtgagtccggcccagtgctgagaccacaaggcacaggttctgctccgtccactagtgtcggagcaactgcttcccgcacaactgggaggcagggcaataaccgaaggtaccaaaatctgtgtggctgttcccctgaaacagaccctctggggcagaaaaaggaagcaaacggctaaattaccaacaaccgggatacttcttgctatcaatgacagtgaccgtgacaaggaacaagtgcctgactttttgggggtgtgggggggtcacaaaccctcaggagaatctgctggatgccacaagccctctcctaggaaaaaaaggaaacgcgtgcgcatacacatggaagtgcgttagcaagtccaggagggttcagatgcctgctgcaccacagggcacctgcgatgccacgcacagcacactgaggacgagggggccaactcatcgtgccaggcaataccagcccagaagaggaaggtctttttctggttttctttgcatcttgctagcaacaatggattttcaccttattaaagtgttgaacaaggcagcaaagccaattgccctggaagccgccaccttgaggccggccacgtgggcatctggtgcagctccctcagtcattcttgtctccctgctggagacagggtgtctgatgccagcattcttaccctgcatgacttgccttgacagcctgcctttcatgtacctttcatatccacctggttttcaaatcggtccagggacagagtgacacagcgcaccagcatgttggagtccaccagggagctgttgatctgcttcaggaatacctggaactatacagaaaccaagctcacagcaggcagtgggctgctggccaggtatggccatggcccggggggatagtcactacaaggggcatcagcgacctctaccagccccactgcttcagataggaagacagaggctcagataagctgagggacctcccctcaccacccaggtactaagaggcactccccggaattcagcacagatccgacactctctccagtggttttacgctcaagggtgctggattcctttaatttttacttttaattttacttcagctagcctgagctgggtttctgtcacacacactcggtgagcctaacacaccaggcccagtccctccctacagcggctcccaccgtggcacccaccatgctgcgtcacggcaggcgcacaagccacccattcccaccctcactccctacccacaagcagccccggttttcatccctgcattcccagggtctagcacaaagccagacagagcaggttccaatgaatgtttgccaaagactgcccagactcccccgtcgtctctaacgtaaaacctgtgcctaaagcctggcagaccaggactccaggtgaacttctggacaacccagcacactccacagagccctgggttaactttacctttgcatcggtgttgatatatttattgaatctcttgaatgcatcaacgttgaacttcatcagctcccccaggaggtcaaagtaactctggagcacatcccttgacttacactcgctgtccacaatgcagtaaaggatgtgctgggtgaggagggacagggtgaaggtgtcaacgtggctgcccccaccagggcctggcatggagctcagaccatgcattggctttgagcaagcatcctggggatggaactggcaacactgtctagattcttgtctgaggatgctggtggctccaaggacaggaccaggcctgacagacctcaccaggaggtggagcagactgggaatgcagcacaatctctcccctgcccagggcgtacagctgaagcctgtgacctgctctgtggtcaccaagatggccggggtgctcagctcctaggtgaggggagctgtcatcaccaggtctaaaacacaggccactgcctaagcactgaggtcattcaagtaaatgaaggacagaatttaaaagcaaaggacacattttgaccccatggtttgtctttgtgtttatgaacgaaattgtttaaatagagtttacaccaaaatactgagttttcatcaagagaataaagccaatttactcctttataaagttttctacattttcttgaagttacattgatttggatcaattcttttccacatggattttataattcgtgggtcagtttcttgtccatatgaaaaaatctgaaagaccaattataactttggccattctgctctaagttttactttttctgaagaccattattcaataaaggaaaattaacttttagtacaaaatatcttcagggtcaaaatgccttgctgggtaaccaaactgtcaccctcctgcatggcctggccaccctctaaacctgtcaccccgtaagcacccatggggaacccacagttggaaacccagggcaaaatctaaggcagcctgcacaggcatttggaagtcacgagatctgctctgctcctgatgaactgtttggggctcaggacaggacacagcaacgcgtgggctggggggagacggaacccaagacactggctgctccagatcatacctccaagaggcctcgcttcagcaggaacatctggtctgcataggaggtggtccctcggaggaaactctccacagcccgagcttgccaaaacctgcgacccaaatactggctcaggtggctaaggctgccctcttccggcccatgttcagttctccaaggggttgggagatgtttgttgccttttcatgtactcaacatttactgaacatctaccaagcatcaggcttcatcctgggcctggggacacagcagtgcccccatcctcacagagagccagctcagtggagaagtcttctatctgggtctgtctggaaggggctgtgtcacagaaagggtaacatctgggatcgaagggctggctcctgcgagcccccgtgaaacatactctaggccttgccctttcacaagaatgggaggacgtgcaattgaggggccaggaatgtgtgtgggaagcggacgaacacatgcagacaggccactgggctcacagacgatgggctggcctagggaagtagtggttgatgctgaccgagggacccagagggcacagcgggtatccacgacagggagtttggacaaggcactgaagtgacaaaggcccatgtgggcatgaagcctcctgacagctcacgcccggccctgatggaactctacctgtccactgacttcaagactcatcttagatgtatctaaggacctcagagaaggtctccctgtattcacccagcccccagccctagcagcggaagaggctttcctttgctgctatagctcctgggccaaccctggctccattccttcccacactgcattgaaacagcacagctctagggaattcatggcagggcccgtatcctagttctctcccacccataaggcaccagcacagaacaggtgcttggtgaatgctcggtcactgtgggctgcagaagaagctctcacatacctgtcgagtcaaaactacacaagatggcagtcaaaccacctctccccaacagtaattgtgcttcaggaggcatggacgctggtgactaaaggaggtattcctaacctcctgagaaacacctggctctgcagccccgcagaatcggcaggtacttttccccagactcacctgaaagacgactctgctggctccttcttcatgacctgcagcagacgagttaataagcccctcttcccatcacacaccaaactcctgaaatagaagagagatattggtgacagatctgagaggctgacaggggccctggggatgggtcattctgctggcttaggcggtgaaaaaccatggggacatttccaagtctgcaggatgccttcctgctccaactgggtccagagccccggagacccctgcagccacagaattaaactgccaagtgcattcccaccacatctcaggccagctttccttcccaggccagaaacatatccagaatcagacatggcttagaactgccagaggagagctgtttataccaaaagtgtgttgaaacaggtcatgccagtctgccagatggggaaagactctgccaatagggtgaggcccagcgtactccgtgcctgaggttcacttccagctggccttgggcaagtgtccacaactccaagcctcagcttcccagtctatgaagcaaaggcaggagatgaggaaatgactctggccccgtcatgggggaaggaagacggccaggcacgcaggggtctgggcccttcaaacagagcagctctgctgtgatccactgcagacatcagggcaggactgggtacaattttatttgaatgaagagttctgctaccttagaaaaaaaagattgggaggccaggagaggtggttcacacctgtaatccctggactttgggaggctcacttgaggccaggagttcgagaccagcctgggcaacatagtgagaccccatctctacaaaaaaaaagtaaaaacactagctgggaatggtggcgcacacctgtagtcccagctactcgggcggctgaggcaggagaatcacttgagctcagaagtttgtggctgcagtgagctataacaccactgctctgcagcctgagagaaagagcaagaccttgtgtctaaaaaacaaaacaaaacaaacaaacaaaaaaggttgggaaatcatggctcttgttggataaagtccactgtattctgacgcctgtgagactagccccccactgcctggctccaggtgaggcaaacctaacccaggtaatgcaacctaacacttggcagcaggtaagaggcttctgtctgtcctgcttggctgcagatgccaccaggcaagaaaggagcacataagcaaaggggctgaatgcacgagacaaggcggtggggcagtgcggagcacacatgacttctggcaggtgacctctctgaggctcacctcatctgtcaagtgcaggtactgatggggctcccctcctagggctgctgtgaggctccaatgagaaaatgcaggtgacatgaatacaatgcctggcacacaggagccctcaggacactgtagctgcatgtgagagaggacacgcgtgcatacctggatgtgctcaccggtgagcccccggggaacgtgggcagccgggatgggctgagggaaaagctgcacccctgcactcacctgtcggtgttgaggacagcttccacctcagggatgttggccttgagagagatggcactgagttcattcagctcctggttgttgagtaacaagtacttgttcctgaaacaaaatgggttggaggaggtaaaggacaggaactggggctgctgggtcagcaccaggctagtgtagggagtctcctgcccacttcctgtggacagaatctgagaagccaccaggcactttcctctagcacctctcactccagccagcacctgcaggagggaactctgggctctcaggcagtggaatctctccctggccccacccccatccccgacccctgcctgccacattcatcgacaaggccccttccctcagcagctctgggcctttctctttgcctacatttccacttgttttctcaaaggcaccaacacctcaacaggtccaatcacactcaagcctggccctgctgcagcagtcccaccaagcaccacggtcacacatcacacagaggcctggttaactgtgacacttcccccgacttgccatccaggcctgtcactgctgggtcctgtgttcccaggacaccagctccctttactaaaaggtatcccacaggaactgagtcatcacacggtgccaaaagtgatcttcagaatcaggactctgatcctgtcactcccggtgaaaacacttccacagcttcccactgcatttagaacagacatttcctgacttaggaggaggttatgtcctgataaacccatcgtatttgaaaatgccgttaagttgaaaacatattgaggccgggcgcggtggttcacgtctgtaatcccagcactttggaaggtccaggcgggtggatcacgaggtcaggagttcgagaccagcctggccaacgtggcgaaaccccatctctactaaaaatataaaaaattagctgggcgtggtggcacacgcctataatcctagctactcaggaggctgaggtagaattgcttgaacccagaaggtggaggttgcagtgagccaagatcatgccactgcactccagcctgggcaatagagcaagattccgtcttgaaaaaaagaaaaagaaagaaaacacatttaatatatctaacccactgaacctcctagcttagcctagcctacctggaatgtgctcagaacactgacttcagcctacagttggccataatcactggcaacacggcaggcacagcacagagtactggttgtctaccttggtgatcgtgtagctggtcaccatttttcttgaaatacattctgagctgcagctgcagctcagtgcccagcattgcaagagtattgaactgtttatcatgagcccaggaaaagatcaaaattcaaaattctacttctgtaccattgtgaagttgaaaaattctaagtggaccatctgtatataaaatccaggcctgtgactgtgacccacaacaccctgtgactgtgacccacaacgtcctgtgcagcccagcccagagccaagcccacatcactcccatcagctggccacaatggtcttccctcgttcaggggcttctggctagaacacacaccctctcacatgcctgttcactcaattcactacaagctgacacttcaggtcttggctggcaagccacttctgcaggggagagttcctgagtgtcctctggccagtcctggaccctgtcaaatgtctctcacagaccccgttcctctcctcctgaataccatctccacttatcactaatgctcaacggtggaatccttggatgaacaactgtctctgttttcagactctgcccttcatgagagcaggggccatggctgtttgcattcatcctgatatcccacagagtactcagactgaagagtctgatgaaagccagagactcacttcctcagggaaaacagcacagttccataacatatgtggtgccatttttcagaaggttaacatgcttcctggagcccttctatggctttcagccggaaaacctctcacagaggatgggtgcatatgatggaggtgccctggggccacagctgtctccaggcatgttctgttagctcaaatgcaaggtttttaaaatatttaaaccaacatttaaaatcaggacctttcacataaatcttaatttctgcctttgcttggcagaaaaaatcagaagttatgcaacagtgggcccagtttcctgtgcacacgcagctggctggagctgagctcactgaaattcttgttcactaaggtccc

SEQ ID NO: 384 - DNA, 43036 bp, Homo sapiens
caggagtttgagaccagcctgggttgtgtgtctgtactctatctagcctgggtgacagagcaagatgctgtctcagagaaaagaaaaagaaaaaagaaaaagccaggcgcagtggctcgcgcctgtaatcctagcattttgggaggtagaggcaggcagatcacttcagcccaggagttagagaccagcctgggcaacatggtgaaaccccatctctacaaaaaatacaaaaactagtcaggcatggtggcatgcacctatagtcctagctactcaggaggctgaggtaggaggatcacctgagctcaggaggtcgaggttgttgtgagccgtgattgagccactgtactccagtctgggtgacagagtgagatcctgtctcaaaataaagtaagaaagaaagaagctaaacaaacatcagtatggggatagatacacaaattatggcactattattacatgtaataatagtgttaaactaagcatagtgaatgcccaccaatttcagagagtggtggtccccaggaagggaaggagaggaataaaaacaaatcaagaggacttcatgtttaagtgttatactttattgttattattattatatttagtattttaaatctatttttaaaattaaaaaaaattttttttttttgcagagatgagctcttgctatgttgcccaggctatgttgctatgttgcccatgcctgtaagcccaaagtgctaggattacaggcatgaaccaccacatctggcctgttttggggttttaaaagagaaaccgaaagactggaaatgtaagtgagtgggtctcaacttcctcttctggagtttctcactgtcaagagatggggacaagagtcaagttatttaagggtgaaatctggcaacagacatggtgaagattgaaaagccagacacatctcatcaaagccccatctgcagtcaaaagaatgaggaaaaccatggggccaggcatggtggctcatgtctgtaattccagcactttgggaggccaaagtgggcggatcacgaggtcaagagatcaagaccatcctggccaacttggtgaaaccccatctctactaaaaatacaaaagttagccaggcatggtggtgggcgcctgtaatcccagctactcaaaaggctgaggcaggagaatcgctggaacccaggaggcggaggttgcagtgaactgagatggagccactgcactccagcctggtgacagagcgagactccttctcaaaaaataaaaaaaagaatgtggaaaaccagagaactgtagattccttttgtttatttgtttgttttatgagacagagtcttgctctgtcaccaggctggaatgcagtggtgccatctcagctcactgcaacctctgcctcccgggttcaagcgattctcctgcctcagcctcctgagtagctgggattacaggtgcatgccaccatgcccggctaaatttttgtatttttagtagagatggggtttcaccatgttggccaggctggtcttgaactcctgacctcaggtgattgatccgccttggttcccaaagtgctgggactacatgcgtgagccaccgcacttggccagattcctttttgaagggactaattcatacttaggtagggaaggagtccctaggatttagaagacagaatgagagctgaaaataatgaaatctgattataaattgtaagaaaacaggggaagtaaatatatcatgaaaagggtcaccgattagtttggaatctcacttataacaattctgctgaattgtctcttactttatggttgtcctccagataagatgggagaaaaaataaaataaaaaacttgttcagtttctcacagcatttattgggagcatttcagattaccttgaaggcatcagtaaggaattctccattttttttcttggagaattgtaagatgaaatggaagatctatccccaagaagggcagatgaaccaagtaaggcaacccactcttgggcaagagggatcatctctggagcaagactcaggtgtgatgtttcctaacatgagcggggctgttgagtggagtggtcaccggtagattatttgcagtctctgtggcccctaggagctcaattttcaaagctgctcattagctagatgtgtacagtactgtcatttcttcccctaaggcagctcaaatccttaatgagcacaggtcagacgtgagcacaaagggggaattcctggatggttgactttctgaccccaagggacaagctgtatgtcattctcttccaaccacatttcctcttatcccgagggtatctcattcttggatcctaggatcggacccctagggagctggtggaatcctccttagacagaatcccagctttctctgagtcagaaattgcttttttttttttttttttttttcaaaccaagtctcactctgcgccctggctggagtgcagtggcgtgatctcagctcactgcaacctccgcctcccaggttcaagcgattctcctgcctcagcctcctgagtagagtagctaggattacaggcacacacgacacctggcaaatttttatattttcagtagagacgaggtttcaccatgttggccatgctggtctcaaactcctgacttcaagtgatccacacacctcggcctcccaaagtgctggaactataggcacgagccaccgcacctggcatcaggtatttctttataccaacacaataatggcctagtacagtaagtttttggaaaagaaatggtgacataatgttgacaaaatgcagataaagcccaaacccagtctgaaacaaatgaagaacaaaacctaaagttgatagggtatgaaatggtgcagtgatggtgacaaaaaatggggcctgtgtgggtttctctttaaatattgaccctaaacttgggaagacaaggggaaaaatgtctgcattcataatcaaaggaatgatacttccatcgtttgatattttatgtagtttactaaggaatgattctattacgattggaaattacattgacaggcaaaagctattatgtatgaaaaatgagaaagaattagacaatggcttccaacgtaaatattaaggagaacaggtctttaagaagacagttctttcaaaaaaaaggccaagcgtggtggctcacgcctgtaatcccagcactttgggaggccgaagaggcagatcatttgaggtcaggagtttgagaccagcctggccaacatggtgaaaccccgtctctactaaaaatacaaaaattagccaggtgtggtggtgggtgcctgtaatcccagctacttggggggctgaggcaggagaatcacttgaacctgggaggtggaggttacagtgaacagagatcgtgccaccacactcaagcctgggtgtcagaaagaagacaggtctttaagatcctaagtaggaaatgataggtaaaaagtgaaagatagggaaagctgaagctatatgaggaaactcatagtaaatgttctctgctttccccttaagcttttcttttttcttttctattttttttttagagacagggtcttgctctgtcgtccaggcaagagtacagcgatgccatcatagctcactgcagccttgaattcctggactcaaggaatcctcctgcctcagccgcccaattgactgggactacagatatgcaccaccacatccagctatttttgtgtgtgtgcaaaaatgggaactcactatgttgcccaggctggtctcaaacacttgatctttccacctcaggatcctaagtagctgggatagccaccgtttcgccaccatgcccagcctaaaatcaagacatatgaacaagagaattcacaagttttctgtttctctgttgcaccaaaggcagttccatcatgacccatccagtatcttctccttctggattcaaggtgtttttgatcttgggtcttgattttgtgtggcatgtacaacctcaaagcaatatggtgaactttttttacctgctctatccctaatgtatatccacattattgaactgcattgctcaccatttatcaaaactcccatgctgccctgacacatctctggcttctcatctgaattggcatcaacacagagacctaatgcattcaagtcattggcacctgactcctgttctttaaacacccagctatgccatgattcaggataatttattttcttttatttttgagacagagttttgctccttcacccaggctggagtgcagtagtgcaatctcagctcactgcaacatctacctcctgggttcaagcagttctcctgcctcagcctccctgagtagctgggattacaggtgtgtgccaccatgcctggctaatttttatgttttagtagagacggggtttcaccatgttagccaggctgaacttgaactcctgacctcaagtgatctgtctgcctccctaaatgctgggattacaggcatgagccactgcacccggccccaacttcttcaccctttcggccttactgcatctcctctcctaatgcatagaggcctccaagccatctattcttcaaccatgttgctatttatttatttttatttattttgagatggaatcttgctctgtagccctggctggagtgcaatggcgtgatctcagctcactgcaaccctcacctcccgggttcaagcaattctcctgcctcagcctccctgagtagctggtattacaggtgcccgccaccatgcccagctaatttttgtattctatttatttattttgaaatggagttttgctcttgttgcccaggctggagtgcaatggcaagatctcggctcactgcaacctctgcttccaggttcaagccattctcctgcttcagcctcctgagtagctgcgattacaggcatgtgccaccatgcccaggtattttgtatttttagtagagacggggtttctccttgttggtcaggctggtcttgaactcccaacctcaggtgatccacccaccttggcctcccaatgttatgggattacagccgtgagccaccgcgcctggccaacctcatttctttaactaggtaactgagattcaatcatatattttccaaaacctcaaattccctactctctgtcctatcataatacctgccctggaaaacgctaaccatctgtctctcctgcctacataattctgccgccacgcggtgatatgggaagcgctaaaaaatttgagatcacctactctaaaggggccttcgacacttcaggaaatttccagtgggcaaagatcttttcatgatttctgcaggattttgaattcacaccatctcaacttccctcttttttttttttttttttttttttttttgagacagagtcttgctctgttcccaggctagcgttcagtggcaccatctcggctcactgcaacctccaactccctggttcaagctattctcctgcctcagcctcccgagtagctgggattacaggcacgcgccaccacgctcagctaatttttgtatttttttagtacagacgaggtttcaccatgttggccaggatggtcttgatttcctgatctcgtgatccgcccgccttggcctcccaaagtgctgggattacaggcatgagccactgcgcccggccacaacttccctgtttaataacaaatgattttacaacttactgcagagagaaatagtaacgaccatgagaaagatttctcaccttctttattttttctcttatcctagattcgagagatttctcaccttcttgacactagtgcgaaagtagtccagtaacaacatcaccagttctttcttctttcactctgcaagcaatgagatgtctgccttcttatctacagccagtatctcctgcttttttttttttttttctttgatacagagtctctgtcacccaggctggagtgcagtggcacgatctccgctcactgcaacctctacctcttgggtccaagagattctccggcctcagcctcctgagtagctgggactacaggcacgcaccaccacgcccggctaatttttgtatttttagtagagacggggtttcaccatgttggccaggctgatctcgaactcctgacctcatggtccacccgccccggccaaagtgctgggattacaggcgtgagccaccgcgctcggccatctcctacttttctatgcaagggtttctcatcattggcacgactgacattcaggacctggtatttctgttagagggagtagggcattctatactctaaccactagatgtcagtagtatcccgggtagtggtaaaaccaaaggcgtctccacaggtggcacaattgtccttgttaagaatcaaaacgtgcctcactcataggtgggaattgaacaatgagatcacatggacacaggaaggacatcacactctggggactgttgtagggtggggggaggggggagggatagcattgggagatatatctaatgctagatgacaagttagtgggtgcagcacaccagcatggcacatgtatacgtatgtaactaacctgcacaatgtgcacatgtaccctaaaacttaaagtataataataaaaaaagaaaaaaaaacgtgcctggcgccgtggctcacgcctgtaatcccaacactttgggaggccaaggcgggtggatcacttgaggtcaggagttcgagaccagcctgaccaacatggtgaaatcctgtctctactaaaaatacaaaattagccagccatgatggctaattacaggcttcatacctgtaatcccagctactcgggaggctgaggcaggagaattgtttgaagccgggaggcggaggttgcagtgagccgagatcgcaccattgcactccagcctgggcgacaaaagtgaaactaagtctcaaaaaaaaagggacccagcgtggtggctcacgcttgcaatcccagcattttgggaggatgaggcaggtggattgtttgagcccaggagttcaagaccagcctgggcaaacatagggaaaccctgtctctatgaaaaatacaaaaattagacaggcgctgtggcatgcacctgtagtcccagatacttggggggctgaggcaggaggatcacttgagcccgggagatcgaggctgcagtgagccgtgcactgcagcctgggtgacagagcaagacttgtctcaagaaaaaaaaaaaaaaaaaaggcatgatactggcataaaaatagaaactaaaggaacagaacagagagcctgggaataaatccaaacatatatgatgaactaattttcaataagggcaccaagaggacaaaatgggaaaaggatagcctcttccgtaaatgctgccaggaaaactagatttccacatgcaaaagaaggaaatttgacccttatcttacgccatacacaaaaatcaactcaaaatggataaaagaccaaatatatatatatatatttttttgatattacaccaaaagatcagactacaaaagcaaaaattagtagacaaatgggactacatcaaattaaaaagcttctacatagcaaaggaaacaatcaacagaatgaatcggcgatccacggactgggaaaaaatatttgcaaaccacatatctgataaggggttaatatccaaaatttataaagaactcttataaatcaatagcagaaaaacaaataacctgattttaaaatgggcaaagggtctgaacagacgtttttccaaagaaggcataaaaaaggccagcaggtatatgagaaggtgctctacatcactaatcatcagggaaatgcaaattaaaaccactgtgagatatcacctcacatccttaaggagaactatcatcaaaaagataggagaggccgggcgcggtggttcaagccggtaatcccagcactttgggaagccgtggcgggcggatcacctgaggtcgggagttcgagaccagcctgaccaacatggagaaagcccgtctctactaaaaagacaaaattagttgggcgtggtggtgcatgcctgtaagcccagctactcgggaggccgaggcaggagaatcgcttgatcccgggaggcggaggttgcggtagctgagatctcaccattgccccccagcctgggaaacaagaacgaaactccattgcaaaaagaaaaaaaaaaaggaaaaaaaagatgagagatgaatgttggcgagggcatcaagcaaagtgaaccctagtacattgttggtgggaatgcagactggtacaacctttgtggaaaacagtattcaggctcttaaagaaatctacaacagaactactatatgacccagcaattcctcttttgaatatatgcctaaaagagatgaaataatcacctcataacgatgtctgcactttcattttcattgtagcattatttacaatatccaagttacggaaacaacctgaatgtccattgatgctcacatgaatacgaaatacaaaatagcagctatgtagtctgaataatattctatctcttttgtatttatatatgatgtcaacattaatatcatataatattgatatatatttcatattatattaaatattaatataatatgttgtatataaatatatacctattacataatagatattcccattatgttatatatcatgtaatatattatatgtaatatatgtatataatatactatatgaaatacatattatatattatatgtattattatatgtatatatgctatatattatggtgtatatattatgtattatgaaatatatattacgttatgtaatatagattatatattatatatgaatatcttatatccatatatattccatacatacattttatatgtgtgtgtatatatatatatacgcaccatggtccatcccctcaataatatattttccaaaacctcaaatttccttctctctgtcttttataatacctgccctggataatactaaccatctgtctctcctgcctatataattctgcccctactggttacatgggaagccttggtttcctaaagtgttgagattacaggtgtgagccactgtacccagcctgattctggaattttgtatatgcagactcctcctgctaaaataatatatattatatataatatatattccataatatatataacatacatacatatattattttagcatatattatataatatacggtaataatacacataatacataattataataaatatgatataatatatattccattgtataaaacatataatatatataacggaatattattcaaccttgaaatagaaggaggtcctgacatttatcacaagatgggtggacctggaggacattacgctaagtgaaataagccagacacaaaaagaaaaatattgcatgacgtcacttacatgaggaactttttttaatcaagagagacagctcaaatacacagaaataaagaatgaggcagttggggaagaaaatgggaagatgtgggtcaaaaaatacaaaatagcagatatgcaggatgaacaccacacaggtgatggtgattttacgcccttcccaaggtgtcattcagaggcacgtggtctccatctgaccctcactggtgatattgatttgatcacctggtccagatgttgtccaatttcttcgctgtacaatttctattactttttctccattccaacatacgagcagtttatagagaggcatttaaggcaattcaaatattctgctcgtcatgcaaatgtcccccagttgtgtcatgtagatgacaattcttgcctgattcaacctttaccactacgatggctacaaaatgctgtgggttgtggttgaaaatttgagtcttgagtagaaattggagaaatatgctggaccgtcagattccaccggggcacggccgccatgccaatccaaacttcaaaactacaattcccagcatcctctccgccccgcttccgtattagacgccgccaatgaagtcccgcgagaattggaaggcggcagtgaagcggaagccattactctctggagtcgattgccccgagacacatgggccaaggaggggtcagcggcgaattctttcggcctgttggggacccctcgtgtccccacgccagactggacctcccgtatgaacttctcttcgcatcggcggcggcttccgtcacctccgctcccccgatcctattcccagtcgtgtaagccctgctttccttaacccttctccccctcagttccaggggtcacgggaggcctatctggcggtgaggactaagagggtacgagggtcgggggctaaagagctaggcatccagacgaggggtgcgtttagatctcgcgatcagcgatatgaaaagctggggacgcgaaggataaaattggaccattgcagctagtgatgagagaagcattggtcacctgatcctgaaaagccctaagtctctggtgggggcggaaaagcccggctgaagtgaattcaagagtttgggggcagttcaggagattggggggcgtcaggatttggacatcgcgaggagaaatcaccttctttctgcgctgtagtcaattttatctcgtgaatgtcagcacattggtgttcttattagcacttaccttgagtaccttttatatttttaatttaagaccttctggttgcacttttttatttattttaattttagtggactcttgtaaatagcctatatgtatatttactattcagttcaacattttgttaattaacttgagttagtccagttatacttatcgtgattattaatattttccattgaattttaccgtcttattttgtggtgtgtcctttcctatgcacatattttaacactggaaaataggacatacatgcaaaaaaagtatgattacacacacacgcagacttacacacacttaaaaggacaacagtaaagcgaatttacaaaccaggccaagaaagagattattaaatctcagaaagctgtgtgcctcttctaaactgcatcctcctctcccaccaatactgtctccgtggatttgactgcgtatacatcttttccagaaaatatatttcctaaattttggtaattatttgtgaatgaactcaggcgcttcagtatttttggaaacaatctttttctgtattgattcaagcacacctttgtaatttagagatttctaaatatcttgtagatgaagtacttacacctagccattctttttcaggaatgtcatggcttaaattctagtcagttcaccaaattccacatactggacttttgttttcaagttgtggtgaatctatatttgaactttgggaatattgtcgtttttatgccattgagttgcagttaattgatttacatcatttatttacatcttctttaatgcctttcaataaagtgttttttgttgttgttgttgttttttcctttttgagatggagtctcacccttgtagcccagactggagtgcaatgacaatctcggctcactgcaacctctgtctccctggttcaagcggttctcctgcctcagcctcccgagtagctgggaatacaggcacccaccaccacacccagctaaattttgtatttttagtggagatggggtttcaacatgttggccaggctggtctcgatctcctgacctcaggtgatccaccggccttggcctcccaaagtgctgggattgcaggagagagccacgatgtccggctcagtaaagttttataagtacctgcaaaaaggatttaggttgtttttgttatatttattcttgggaactttgttttttggtgctcagaaaagtctaacttttgtgtagtttgttggatgttcttcgtagacaaggaaaatgtgtacaattcaaaaggaaaatacaaatatttattttatacagacgataaattgtcttttttgtttgtttgtttgtttgtttgttttttgtgctggactgggtggggacttcccttgtcattgactggagtttggatggcacactctaggcaagcctgtttgttttctgatcttaaagggaattgtcatttgtgtctgccgaaggcttttctgtcgaatagtttttattaggtcaaggaagctcccctcttttcctacttgagtttttcttgtgaattgctgcaggcttttaacaagtgattttttttttttttttgccattatgtatctgtttattgatacattttgtatctgtttgatacaaaatctatattgatagttttgtatctgtttattgatacatttctagtaccttaaattatggcactcagtactgctgtgtaacaaattaatgagtgaataatataattttttttctatcctgtagtgtggcaaattaaaccaattgattttctcttgttacattgaatttgtattggtaaataatttggaaaggacatgttactatttgttacttttggcttcggtttgctaatactttgtttggtgtttttggatctatgcttgagtgaaatgttccttttctgtttcagatttatgccagcctcataaaatgggatgagaagtgttctgttttctaaactctggaatgttttgcataagaatagaatattttgttccttagaacgggagtggtacctggaaaaaccatttgggtctggagttttctttgtggaaagttttaaagctattgtttctgttcttttaaggtttgtggggcattcaggttttctgtgttgttatgatgagtaaaatttctttaggaatttatttattccatctgaggtttaaatcgtatagtcagggttgttcataacatactcaaatttttaatgcttgctgcatttgtaatgttatccacttttttatttataataattatatgttgctttttacaaaaataaattccatcagaatgttgtcagttttcttcttaaagaacttctggcttgattgaaccactttatgatatatatgttttctattttataactttctgattgttatcattttcttcctttttgggatgtttctttccagtttcttatgttgaatgcctgtcacatcccaaagaattgcagtatcatactttattgtattttaattataaatatcaaatatcatggcttctttggcatgcagatttagaatttttttcttttaattttcatttctgtgactttttttctggttatcttttggtcattgtttgccaactgcattgctctgtggtcaagcattttctgagacaaacatggccccatgagtgctgtctcatcatgttcaatctgcacatagttattgaactgcctgcttaaactggatttgtgagagctctggtggtggcttcatccatttctccttagaattctgtccccccttttttttttttaatttttgtgttttccttttttttgaggctgtgttttatacacacaggcacacacacacacctctttttggatttataactttttattatgtaatacttcatttttctctatgagcctttttgccttaatctattctgtctgatactaacattcaaaccagctttctttttttttttttttacttgccttatatatccttttatttccattcttattgtactcttttttctttctttctttctttctttctttcttttttttgagacggagtttcactctttttgcccaggctggagtgcaatggcgcgatcttggctcactgcaacctccacctcctggaatcaagtgattctcctgtctcagcctcccaagtagctggaagtacaggcgcatggcaccacacccagctaatttttttattttcagtagagatggggtttcatcatattggtcaggctggtctcgaactcccaacctcaggtgatccacctgccttggcctcccaaagcattgggattacaggcatgagccaccgcgcccggctcttattgtattcttatattttagatatctcttgtacgtagcatataattggattaatctattctgtgaatattagtattttagttaaagcatttattctgttagcatcttctgtattaatatatttgaatgttacatttgtcttctgttttttctctagcttcttttgtgtatttttgtcattctccttttttattttctgtacattttgaatttatttactctattatttcagtggttgttctaaataattcttacccatgctcattcactaaatctagatttgcatatgttactctcctgatttacatggttttcttatgcattttcattctttctttattgatatatcatagttgcacatattgagttctttttttaaacctcagaagaaattattattgctattgcataccatcatttcttgtttcattatactcacatgtttatcactttgagcactttacttggttcttacactttttggtgtaattcttccactgtttgctttggttctttaattacttctttctccctgaggtatgtctttgatgatgtctcttttctgtgggttgcaagcccacaggaactttgttttttggtgctcagaaaacacctctttctctctttctcagtggacatttttggtggtaatagaattttatatttcagaactatgaagatgttccattatcttctggcttccactgttaatgatgagaagtcagctgtcagtctaatgtttgtttgtttgttttctgagacagagtctcactcttgttgcccaggctggagtgcaatggcgtaatctcgtctcactgcaacttctgcctcctgggttccagcaattctcctgcctcagcctactgagtcgctgggattacaggcatgggccatgacacccagctaatttttgtatttttagtaaagacaaggtttcaccatgttggccaggcagcggttttaggagcctagaaatgtgagtttttcgttttgttttgttttgagacagggtcttggtatgttgcccaggctggtctcgaactcctgcgtgcaagtgatccacctgccttggcctcccagcatgctgggattacaggtgtgggccaccatgcccaggcttactttgtttcttaatggagagatatttacggtgtgttttaacaagacctccaggtgactcccatgtaacttaaagtttgagaactattgcttaaaaggtaacctgtctttttctcctctggctgctgttcagatattctttttaccgttggtattatctggttcattgtgcttaagattttatctctcttcaatctgtttatattttccttcaaaatgaaaaatctacagccactatattttgcagtgattgcctaggctccttctctgtctctcatcagtaactccagttagaaatggttcaattccttatcttctgcccccacgtggttcttagctgtatttatgttcctcaactctttttctgtgcttcccttgcatttattgctacaactggctttgaaacttcagccttcataaaaatttcatgtagagtttattaaaatactgattcatcagcccaccccaaagagaattgaactgagatatgatctgggtgtcagagttacttaaagtgttccaggggacgcttatgcagcagactatatttaagaaacaaattattattattattattattattggctgtgtataatctaaaagctatttacttagggcttttgttgtgggtttccattttgctttttttttagcaattgtaattgccctttagaaatcataaatttttaattttctgaatgttaatttcttgccagcacatgaatttgaaacctatcatctgtctgtactttgtgttgcatttgaaatagttatgcatggaaggtttaattggggcacctaggttgcttgttggaaacagaattcctaccctgctccccaccccctgggacatctcatctagctggttgaaaggagggtatattgatttactaatgtaatgcatttctggaccaagaaaatggcatatgatgttctcacaacctttgttgccttctctgtctctcgctatatatatattgtatatattatttatatactttttttcttttttttttttttgaggcagtgtctcatttctgtcacccaggctggaagtgcagtggcatgatcttggcttactgcaacctccgcctctcaggttcaagcaatcttcccacctcagcctcccaagtaactgggactacaggcatgtgccaccatgcctggctaatttttttgtatttttagtagaaacggggtttcaccatgttggccaggccagtcttgaactcctgacttcaaatgatctgcccgcctcagcctcccaaagtgctgagattacaggcatgagccaccatgctgggcctatatttacgtgaataacagtggtagaaatggttctagcaagggcagaaataccagtcagtaaaagtaacaaaataattattctctctacagtatttacatctgcaaattctgaatatcctgggatactgtgattaagttgaatatggggataaaatcaaatattgggagaattatggtcctgagaaagctcataatggaacagttttgggcaacatttgttttggaccacaaacttgatggaggaggcagatcttctaaaactgaggagcagggctggagcaagggtgaggtttgtgagtgcagagccagggagccactcgctctgagccaaccttgtgcttgtctgacaccagaagtgcttccttaaataccacactcttgtctagcagccttggttgcctcatcccagtcctggccctggtgaggagaaaaacagatcccaatgagaatagagtaagatgtgtagaaatagaaaaatagaactgctttcaccatgctgtaaagaaaattaaaagagaaattaagcaaccccaacagctctgaaaaattaacctgtccgttctaactcatccatggtgacagcattccaatgacactggtttttttttttttttttttttttttttgagatggagtctcgctctgtcgcccaggctggagtgcagtggcacagtctcagctcactgcaagctctgcctcctgggtttcacaccattctcctgcctcagcctcctgagtagctgggactacaggcgcccgccaccgcgcccggctaattttttgtatttttagtagagatggggtttcaccattcacaggatggtctcaatctcctgacctcatgatccgcctgcctcagcctcccaaagtgctgggattacaggcgtgagccaccacgcccggctgatcctggttttgtttcatgtatcatgtagaaacggggcagaacgtctctgagttcatagatcctacagctgttctagacaccctgctccacatcctgctggggtcgcttagatgctgaaatcttcctgctttatttgtattcatggccaccagttctttgagactctctgatacagtttggatgtgtatccgccccctccccccctccaaatctcatatggaaatgtaattcccaatattggaggtggggcctggtggggggcgattggatcaggggggcagatttctcatgaatggcttagcaccatcccccttggcactgtcctcgtgatggcgggtgagttctcctgagatccggtcatttacacgtgtgtggcacctcctcccaaccctgctgtcttgctcctgcttcaccatatgctttgcctgcttcccttttgccttctgctatgattggaagcttcctgaggcctccccagaagcagatagcactgtgcttcctgtagagcctacagaactgtgagccaattaaacctcttttcttataaattacccagtctcaggtatttctttatagcagtgcgagaatggactaatacaccatcacccagcactgacaacccctgaaagtgatagaatcactcaggtgagaacttggccagaagctccactctgagctctggtttgcatcgttgcaaaacatcgacaaggttccacagactgaattgatgtgggtgcgctctctaagctccagccctctggacactttgtccttcatggagggtggtggtggatgttggccccagggtgttgggctaagccatagggctgtgtcctagtacctggattactgtttaatttcacaggaccttctgaggagatcccagaccccctacattccataggcccctcctttatggtctcccaaggtctgggtggctgtctcagtatgaaggcaaatgtagatcagcttgctcatcatccattcattctttcattccctacttattgtcttatttatatcaggcactggaatggtgaatgaaatatcatcaaagtaaaaagtctctactcacctggaatgtattttctagttgggcatacaggaaatcaaaacaagtaaactacatagtgtgcatggaggagacagcagagagataataatgcttacccggtgttctgtgtcctgtcctacatttcccaggatccttggagctggcaggggcatgtgactagttctggccaatgggctgcaagtgcttcagggtcaaaatatagacgacagaatgcatagttgtccagcttcctgctcatcatctatgaccaacatggccaagggtatcagttggttcagagacaagtggcatccttgaacaacaggaaaacttttgacatcagcctgggttgaacaagtgacatgagcaaggcgtaaactttccattttattgagtcattgagatttgggtttgtctgtttttgcagtaaaaaatagagcctaatcttacacagaacattacttggaaattagtgctttagggaaaaagaaaaggagtggagaattgggattgaaagaagcaggggtttgcattttaaaaagtggccaaggcgggtggatcagctgaggtcaggagctcaggaccagcctggccaacatggtgaaaccctgtctctactaaaagtacaaaaattagccggacacagtggcacacctatagtcccagctacttgggagcctgaggcgggagaatcacttgaacccgggaggcgcaggttgcagtgagctgagatcacactactgcactccagcctgggtgacagagcgagactccatctcaaaagaaaagaaaagagtggccagtgaatgccagatcaggacaggtaaagttgaataaagatctgaaggatgagagggggccaggcacactgagaatgtgggggaaacatttcaagcagaggagcagcaggtgcacagaccctgaggtgggagcatggctggcggggcctgatgcacagcagtgaggcttctgtggcttgggtgagggaccagtggcagagcgagttgtgggtgaggcggcagggacctgggcccttggtctgagtgagatgggacaccatcagaggatcttgaacagaggagcggtgtgatcttcattttacccataaagttacggctgtcatggaagctaagggaagtcagggacagcagctgggagaccagttaggaagcagttggaatgttctagaagagaagcgatgccttatgccaaggcagtagcagtgtaggtggtgagaagcaaccagatttttgtattaagttttaaagttaaggctggcaggatttgctggtgatgcaggtgtggtttatggaaaagaaagaggagagttgaaggtgatgacgagcaaggcttttgacttgagcccctgggaggctggagctgccatcaacgtggggaggctggtggcagcacagttgtaggtgtttaatgtgggatcctgttggctgttgcagtagggatactaagtagccacctggctgccactcactctgagtcattctgggtggggcaggtgccagggagcggagagtggcacccactataaatgaacaattctgttaagtaattgtgaaatcgtcagtggtcattttattttaatgataatggcattttagagtgaatgtttgtttactgagcctatagagttccatacataacccagtgttaaagtcttcagtttccagatgagaaaactgagttttgatgaactgactcttgggaggggaatgagcagaactgtgggcttgcattaaaggggagtctactgaggcctcagggacagggagaccttcacagaagtgcaatcagaacctgggtgtcagcacctccaaatggtgggggtgtttcacaatgtggacctgtgggagatgggggagaggggcccaggggaaccctgacctttaggggctgggcagaggagggatctcaagccagagtcttcaaaagagcaaccagagatgtgagcacagactgggatgagtgggctatggctgcaagagcagtggcattcccaggaagagggagatagattcatagtgagcaagatgatgtgtcaggaggtcaggcaaaggaagggtcaagatgtagtgtcaaggagttcccacataggggacagtacaggtgacataggtcactttgagaggcaacaagatgtggctccgcagtcacgtcagctgggctcacaacttccacctatgaccttgaccaagtgtctcggacccttggtgccttattctctgggtacttgagaataattccgggaggttgtgaggattaaataggagtggccctggaaagactcaggagaatgtctcataccttgtaaacactacacatgtcgttatttgtagaattggcattaatgttggtggggaaaggtggaatgggacctgcagaagcttgttagttgagcatgaatgaatgaatggtaggtgaggatggagatactgtgcctcaggaactgagcctctgtcaccctctctccccttcctcagcagtgacttaatgtcagaacccaaaggcacaatgactagaaaagggctttgtaaaaagaatgaaagcgtcatgcatctttgagttggcccaagatcaaatttggtgttgaataatgaatccccaaggcagagtttatacgttaaaacacacttcctatattattgttttgaaatgtttctgaatatctaaaacaattccaatagcagaaatactaattgatgttgaaaaagattgttataaccctggtaatgtttaaaagtggtaatattgattattgatctgagtcagatgttaaagtagcagcgtcacggttcttacatcagtgctgtcatgagagtcgcggtggaagccagagagaggaggcatgttcatacaaagcaaattaaatcccctcccgaggtgtgggccaccatacctcaccaatgtattgtggttttgatgttatttccttaatgactgatgttgttaatcatcttttcatgtgtttacagttcatttctgtaaatttggagaaatgtctgttctgttcaagtctcctgcccacttttttactgggttgtctttgttgttgagtttataatgatattaaatccctatcacatacatgatttgcaaatattttccaccattctgtgtctcattcactttcttgataatgtccttgatgttaattctaaatgtttggtagggttcaccagtgaagccccttggtcctggactttttttttttttttttgagacggagtcttgctctgtcgcccaggctggagtgcagtggcgcaatctcggctcactgcaagctccgcctcccaggttcacaccattctcctgcctcagcctcccgagtagctgggactacaggcactcatcaccacgcctggctaattttttgtatttttagtagagatggggttttaccgtgttagccaggatggtctcgatctcctgacctcctgatccacccgcctcggcctcccaaaatgctgggattacaggcgtgagccaccgtgcccagctggtcctggactttttatttaatggcttttgatgactgcctcagtctcttgttataggtctctcaattttctttttcttctagagcctgtttgggtatgtttcaaggaatttgatacatctagagcattgatccccaagccctgggccacagacaggtaccggtccctggccttttaggaacaaggccctgccgcaggaggtgagcggagggcaagtgagtgaagcttcatctgtatttacagcggctccccatcactcacattacccctgaactccacctcctgtcagatcatcagcagcattagattctcataggggcgcagaccctattgtgcactgcacatgcaagggatctagattgcacactccttatgaaaatctaatgcctgatgatctgtcagtgtctcccatcacctccagatgggaccatctagtttcaggaaaacactctcagggcttccactaattctatattatggtgagttgtataattattttaccatatattacaatgtaataataatagaaataaagtgcacaataaatgtaatgcactcaagtcatcccaaaaccatcccccctcacctcaccatccatggaaaaattgtcttccatgacaccagtctctgatgccaaattgggtggggactgctagtgtagatgatctaatgtgttggtgcataattgttcatggcattctcttacagccctttgaatttccgtaaggtcggtagtaatgtcccacttccactgatgattttagttacttgcatctttttttgttagtaattctagctgtagttttgtcacctttgttgatctttttgaaagaaccaacttttgttttcattaattctcctattctctatttcatttgtctctgctttaatctttatttcttcacttttgctttccctaggtttagtgtgtcaaggtagttgtttttgtttgtttgtttgtttgtttgtttgtttgagactgagtctcgctctctcacccaggctagagtgtgatggcacgatctcagcttacctcaacctccgcctcccgggttcaagcgattctcctgcctcagcctcccgagtagctgggattacaggcatgcaccaccatgcccagctaattctttgtatttttagtagagacggggtttctccatgttggtcaggctggtctcgaactctcgacctcaggtgatccacccaccttggtctcccaaagtgctgggattacaggtgggagccactgcacctggctggaactggtttttgtatgagatgtcttactggtggcttttcctaggcaaagggaataagatctcgagttcctactggaacctaagtgttagagatggggattcaggttaaatgagtggatgtgattacctgggcaaagcatgaggcatgcgaaggaatgggtaaagaatggctcttgagcagaatcagcctttagtggtgaaagaggacctctggatggtccagatgatccagagaagcagggaaagaaccaggagacagttgtagaggagccgagaatagagaatgattctcaaagaaaatagacaccacattttcgtgagactctaagactgaagtgcatttactggattcactgacacgggagtaaattgtattttctgtgaggatggggatgatggtagtggatgctgggtgtactgaattgggagatggtgaatgtagactgctcctaagtttttgctcggaagggggcactaaggggagccagggcaggcattggtttcaagatgggatagacctgagcatgtgtccatgcataggaaattgtctagcagggcgagaaatgaggctgaaagtaaaggagagccaggtagtgcgagggtccagagacggggatgggcctggagcagatttgaaaggattgccttgagaagggagggcagacatctctttgtcatagaaggaaaggaggaggtcatagatcagttgtgagaagactgtttaaataactagaagcaagaaggtaagaaagcctcattttttttctttcttttaagcagggtttaatatatgttcaagaaaatgcataggtcttacttaggtgatcagtttgaatttttgacaattgtgtacactgtacatctgaaaataggtaagtttctatcatcctagaaagttccctttgcttctttcagtctatccctgtcttatcctccattgaagaaacccccttttttttttcaattctatcaacttaattacgttttgcctattcatggacattatattgttggaatcagagcgtttcttgtgtgtccagtttcttttggccagcatcgtagggatttctccatgtagtgtgtctgcatagtttctttttattgctgagtagtattccattctgtaaacattgcaatttgtatatccattctctggttgatagatgtttagattgtttacagtatttggctattaggaatcagactactacagacatttttgtacgagtctttgtggatataaattgtttacagtttctcttatataaatatctaggagcagaattgttggatcagatagtcagtgtgcttgttaaaaactgccaaagtgttttccaaagtagttgaactatttcacactcctaccatcaggatatgagaggtgccagtgtgccccaaactcagcagcatttagtattggtagtcttttttattttggctgttctagttttaatttgcatttctctaatgactatgatattcaacaccattcgatgtgattcttactggttttgtgaaatgtctgtttattaattaaagtcttttaccctttttgttgggttgattttctttctttctttctgttttgaaggagttctttttattttttccaataagccttttgcactcctatctaggagttctttaatctgaatacgaattctttttcaggtgtatgcattgcagatatttttttcccaatccgtggttcactgttcattttccttttttctttttctttttttgtttttagagacagaatcttactctattgcccaggctggagtgcatgatggtagctcactgcagctgttctctatgaatttttaagtttctgattcatctcaaaagatgtttaaattcaaattcagtgagtggaggaggtggcagaagcataggtggccgcgaatctctaaagtgagagttgatgtgagaaggttgcacaggagactttgcccagagagcagatttccaaatcattgcctgtgaggtgaggctgattctagtgatgatgcagtccaggccatggcccaagggtgtatatgttggtgtggagtgtgggtgcaaagggcattggagtttggaactcatggttgatcctgggtggaccatcttcatggatagagccatcctaaatgatcgcaggcctcgaaggtgaaggaagagcagaagtctaggaccagagtgtttaatgagtgagggggtttaacagagttgtacttggtggaaaatcacttaggaagagtaattctgaacccacttatagcagatcaggggctgtccccccaccacatcaccacattgctgagagagtttacctaagtaagataaaagtccaggatcaggcagatcttgctgctcaaaagaggaaatgccaaaaaacaaaactcagagttttctttggtgagcaggagagacagatagcctttcactactcccgatgttctttcatttgctacagatgccagcttggagagtcacgtgagagcaagagagtagctttctggttgtcctggtgccctgctcaggcaaactgactgccattctctgaggatggcagctctgtcccccacatttggtaagttcttgggtcagtgcgtgccctgagaaagtgagtgcaagtggcccctgccacttgatggggtgaaagatacgtacaccatagagggctgctgggagaggatgggcaagtggaaaaggggtgggaacagagccccagcagccaccccagtgactgtgtctgctgagggtcttggtgggtctgggagcaggccagtgtccttatcattcatgcatgaagagggtgcaggtaatgggtaaccctgagttatctcatttattattttgatcactttcagcaaggtcacaactctagctctcagaacttgcatttcttcactcctaggttggaactatgtcacttcttatgagtatgtagcccaccaccctctttatgtttttggtggaacagggctgctctgacttgttatgaaactgatgtgtgcaagagaggtggggggaggaagagagagagaggattgaggatgtgaacactcagaatcagtgtggagcagtttcctggtttacaagtgttgtattatgagacagggcaggctctgattctcatgaaccctgttttctcctccagccacgtccacccaggattccacctgtctccaggactcagaatttcctgtttcttcaaaagaccattcctgtccccagaatttggacctgttcgtgtgcagtggtctggagcctcacacacccagtgttggttcccaggtgcactaagatctctgggtccctagagcaggagaggcacttcctggaagaccccaccagtgcatgctggaattcttgcagagcttcatctcagccagtggatgccagaacagggcccaagagagagccaaggaatattggggctgtcctggtgttggggaagttaggggaagtgatttatgtagcatctgtttccctcatgcttgcaaaatctcaggcccttgctcagccccagagacggggggaaataaagggcaaagctctcggagtgggctagaactggagggagattagtcccttgtcagggttgcatctgaagtgacggcacaggacaagatggcctcaatggggagagaggatgtctgaggactgatgcctggaggaaatgttgagccccgtagcaggccatctggaaatcctgtgttgggtctctcatgcccggtcttcaacctcagccatcttaccatgaacatcgttaggctggttcctcgctgaccccaagtttgtgtggcgttccaggaatcggtgactttccaagatgtcgctgtggactttaccgagaaggagtggcccttgctggattcttctcagagaaaactgtacaaagatgtaatgctggagaactacagcaacctcacttcactgggtaaggccagtgccatttctccacttattcatccatgaattagatgtttttgtttgagtatgttctgtgacccaggaactatgcagcggttcagaacgcagctgtgaacaagcagccccagcacccatgcttaatggggcctctcctgggtatcgaggcccatctattgcagggaccatggtggttctccggtgtgtgtctgagcttggcatgggcttctgaaatacgaaatccccattcttttggagggtcagtgtgtgggtacttgtgatcttatttcctatttctttttttttttttttttttttatttttggtgatgaagggttctcactatgttgcccagactgatcttgaactcctggctacaggcacgagccaccatgctttgcctgtggttttgttttctatcagtcaaaaacttttactgtgttccttagaaattttggcaccaccattttgctgctcctaagtcagacttgtccaccctcagaacactgaagacccaagtgttgagcccaggctactggaaggggttgtcctctgcatggccctccctcaacctgtgtctttcccgtgagtgtagggtatcaggtcggcaaacccagcctcatctcacacttggagcaggaggaggagccgaggacagaggagaggggcgctcaccagggcgcttgtgcaggtgagcgagccccaggcaaagagcggtgctgtgactctacctctattcagtgactggggtggagggaggtaggttagggagtgtcacccagggaaattgagagatgctccttccctctttttgcccatccattctctgacaaatcttttggtccacacactccttcatctttgactttcacattcccattattgggctctttgtcccattctttcatatttgatgtttctgatcatccgctttctgtcattatcaacatcatctgaattgccttaaatttcttttttcttttttttttttttttttttttttttttgacggagtctcactctgttgccaggctggagtgcagtggcatgatctcggctcactgcaacctctgcctcccaagtagctgggactacaggcatgatgccgccatgcctacctaattttagtattattagtagacatgggtttcaccatgttgtccaggctggtctcgaacacctgacctcaggtgatccacccacctcggcctcccagagtgctgggattacaggcgtgagccactgcaccaggcctgaattgacttaaatttctacccctggcattgccaaatatctcacatgaccagattttttaacaattgcttttgcaccacttttccttacatagccttaggatctgccaagaaatccacctgtcattgtcaccatcatcccaccattttccttttccaacaattaatacttttccaatttgtttcagattgggagactccatctaaaaccaagtggtcacttcttatggaagatatttttgggaaggaaacgcccagtggtgtgacgatggtaagatttccgtgggataattctggatcttccttccacgtctgaggagactggggcagcctaggttagaaaagcagttcaacaccagggcaagcagcttccctcagaggagactgtgtttcagagacactgggtattaccaagatggagacaaccctaaagctaacctcaagctactttacctagagtgtctctgagtgaagatttttatagctgtgtctcagatattgagtgttggggctcaatgcagtttttgttttattttatatttatgctgtacacttacttatcaatttagttttggtggtgtttattttttggggggcagacagtcttgctcttgttgcccagtgcagtgggcaacatcttggctcactgcaacctctgcctcccaggctcaagccatcctcccacctcagcctcctgagcagctgggactataggcgtgtgccaccacacttggctgatttttctattttttgcagagacaggatttcaccatgttgcccaggctggtcttgaactcctggagatccatcagcctcggtctcccaaagtgctgggattataggcttgagccaccatgcccagcctcaattcagtggtttttgtttgtttgtttttgttgttgtttttgttttttgtttttttttttgaggcacagtcttgctcttgtcacccaggctggagtgcaatggcacgatctcagctcactgcagcctccacctttcaggctcaagtgattctcctgtcccaccctcccgagtagctgggattacaggtgtgcaccaccatgcccagctaatttttgtatttttagtagagacagcgtttcaccatgttagccaggctggtctcgaactcctgacctcaggtggtccacccgccttggccttccagagtgctgggatgacaggcgtgagccaccttgcccagcctcaattcagttttaagcagtgaagaaatgctatatgcaaaaagctttgaaaaagtaacacatgtggagccttgtggcctggcattcacctattgtccttgatggagctcaaatggggcagggacagcacgtttgcacggcagatggttacagctctagtcatagtaatgtgcttctatctgttcatagcagtgtatgtggggatgacgcttagggttgcaatgaatatgagaattgcctttgtcagcacttacgtcttaaccaacaggaaagagccggtcttggagagaagtccactgaatacgctcacttgttcgaagtctttggcatggaccctcatctcactcagccaatgggaaggcacgctggcaagaggccctatcaccgccgcgactatggggtagcgttcaagggcaggccgcacctcactcagcacatgagcatgtacgacgggagaaaaatgcatgaatgtcatcagtgccaaaaagccttcaccacgagcgcgtccctcacacggcacaggagaatccacaccggggagaagccttacgagtgcagcgactgcgggaaagccttcaacgacccttcagcccttaggagccacgcaagaactcacctcaaagagaagccctttgactgcagtcagtgtggaaatgcattccggaccctctcggccctgaaaatccacatgcgagttcacactggcgagaggccttacaagtgtgatcagtgcgggaaggcttacggccggagctgccacctcatcgcacacaagagaacgcacaccggagagaggccctacgagtgtcacgactgtgggaaagctttccagcacccctcccacctcaaagagcacgtgaggaatcacacgggggagaagccctacgcgtgcacgcagtgcggcaaagccttccgctggaagtccaactttaatttgcacaagaagaaccacatggtggagaagacctacgaatgtaaagaatgcgggaaatcctttggcgatctcgtgtcccggaggaaacacatgaggattcacatcgtcaagaaacccgtggaatgtcggcagtgcgggaagaccttccgaaaccagtccatccttaagactcacatgaactctcacactggagagaaaccatacgggtgcgatctctgcgggaaagctttcagcgcgagttcaaacctcaccgcacacaggaagatacacacgcaagagagacgctacgaatgcgccgcctgcgggaaagtcttcggtgactatttatcccggcggaggcacatgagcgttcaccttgtaaagaaacgagttgagtgtaggcagtgtggcaaggccttcaggaaccagtcaacgctgaagacgcacatgcgaagccacacgggggagaaaccgtacgaatgcgatcactgtgggaaggccttcagcataggctccaacctgaatgtgcacaggcggatccacaccggggagaagccctacgaatgccttgtctgcgggaaagccttcagcgaccactcatccctcaggagccacgtgaaaactcaccggggagagaagctctttgtgtcatccgtgtggaaaaggctccagtgagcgcgcctgctttagagacacaggatgattcagaccggaaacagacctcgtgggtgtaagaggaagcctctgtgagctcgcaccttactgggtgcaaaagaatccacggaacttgggagaagtccagttcctgtaaaaactgggaagacgaggcgttctcatcccataggaggtttgtgagaactcacgccgggggtgaaaatgtacgtctgtagcatggagaagccttcagggtacattcagctcttaacaaacacaggaggacttaatggcagcttggcatttaatgtcaaaatccaagccgtggcatttaatgtcaaaatgacttcagaccacttctagccttctgggcccatgagtaataatgagcacactagggagcatctctgtaaacacagtggctggggaaacccttcctagtctcacttgattcctcatgacggaaatcacactaaagagagaaatcagtgaagtaaggaacgtggaaggtcatgaatgggccgcaaaccacggccagctgcttgtctttgtatggcttgccagctaacaatagtggttccatctttaaggaagaagaatgtttgatggagaaaatttgtggccaatgaagtctgaaatacttcctgtcatctgcccctttccagaaaaacttggccgacccttggtctacagcacgggttctcagtcgggcgacgatttggctgtctaggcgtcatttggcaatgtctagagacatttttggtagttagaatggggggaagatactcctgacttgtaataagaagacatcagagatgctgctaagtcggctccagcacacaggagccccccacaacgaagagttagtgcccccaaacgtcactgttgctgaggttgaaaataatcatgcagtcattcctcaattactgcctgcagcaattcctccatttttatgaatcttgtgagcacttacgctaggagaaatttcttttacaaaacttttaaaatacaattagtgctgataattcctatgtggaaatgattccagccatggtcccctcacttgagcatgtgaatattctcacggagagaagccccagcgagattttccggtgaatacgggattgcacttactctttcatcacggaaacagaccccccgagagaagccccaacgagattttccggtgaatacgggactgcacgtactctctcatcatgaaaacagagccccgttcataaatttttcatctttatttttaaggttatactcctctaaataacccttaagcctcatcaagaaaggtttgtttatagtatttttactatagcttcatccttgataacgtcctaatttccttctggacaacctccttgaccaatggcatattgagatctatgtgacatgaggatatttctcagtaccactttgttactggtacctgatgcacacggattgcgaccagagcatgatgcctccatcaagtggtaatatgtttgcagcctgctgtccagccaagagtgacagatacttctagtgacttccccggtatccactctcatcttcttccaatatcaagagaatccaggttctgtcagattagtaaggtgtgctaatctaaattttaaaaaatctcttacaggttttcttgcagctggtaccatccatgtctcacagccctggccactgacagatcagcagatgtcaccacatgggcttctgagaaagctcttgaatggggatcgttcttaaacatgaattcctccctgtatgttttgttctttgctttacttttcaccttgcaaagagatccagtacctagtattggaagatccaccttaacgaccgtgcatatgaaaaccacagtctaaggaagtgactgcagaaagctcacagcgaccctggcctcccctgtggcctctttgagtgtctgcagcagccctggacttccagacttctatcacatgagaaaaaataaaactgattattggtttaagctgctatggatatttcattgtttttcttttaaatttatttattttaagatgggggtctccctatgttgcctaggctagattcgaactcctgggctcaaacaatcttcctgcctcagtctcccaagtagctgagaatacaggcatgtgccaccacacccagcttgtttttctatttcatttgtttattggtgggagggggtttctacacccagctggatgctgcctggagcccatacacctggtcattggtcagttgtgtggtttttttttgtttttttttttttgtttgtttgttttttgagacagagtcttgctctgtcacccaggctggagtgcaatggcgcgatctcggctcactgcaagctctgcctcccaagttcatgccattctcctgcctcagcctcctgagtagctgggactacaggtgcccgccaccacacccggctaatatttttttgtatttttagtagagatggggtttcaccgtgtgagacaggatggtcttgatggcctgacctcatgatccgcccaccttggcctcccaaagtgctgggattacaggcgtgagccaccgcgcccggccatgttcagatgactgattagcctatcaaaggcattcttccgtttctttatggtggctttgatttctgatctttccttctgattctttgagtctctatttttctgctgatgatgtagggcagatgagcccccaaactgggggttagcccaggagggttcttggctttgctcaggaaagaattcaagaggcagccagcagtaaaagaaattgggtttattgaagcagcagggcacagcagagtggctgccccttgtggagcagggctgactcataggcagtatacccagggtagcagcatataggctgttggctagcagtatttatacccagttttaattacatgcaaattaaggggtgggctattcagacagcactcctcattcaccttccaccatgattgtgaggcctccccagccatgtggaactatgagtccattaaacctctttatgaattaggcagtctcaggtatgtctttattagcagtgtgagacacagttgctccggcctataaatgacacatagttttaagtctgtttcctgcagttctcctatgattggccagggttttgattctgttttgtttttttgcattttcaaattaagggtagatgattctgagggtcttgctccagctctgtctcaggcccccccaccagctatccctctttcttgcagtttacctaacagagccttggggtgggcatgtgtgggaccgtggtgctaagatttaatgctttttctcattttactcatagttatgttgcaattttggcattctctatgtcttaaaggcagtgttgaaggtatagttttgtgtagaagattcataggtgtggagttacttcacagcatttgaaaggggatttggggaggttgcttaccactcactggccattgtttttagttacctggaagtctcctcaccttagtttttggagatactttggctgaatatgttattttattttattttaatttattttttgagacagagtgtcgcccaggctggagtgcagtggcatgatctcagctcactacaacctccacctcccaggttcaaacgatcttgtgccttagccacctgagtagctgggattataggtttgcaccaccatgcctggcaaatttttgtatttttagtaaagttgaggttccatcacgttagccaggctggtcttgaactcctgacctcaggtgatctgcctgcctcagcctcccaaggtgctgggattacaggtgtgagccaccgcgcctggtctggatatgctttaaaggggtcatttctttgtcttctggcctccattgttgctgactaaaagttagcgttattcttaacattattcccctgtaagtaatgtaagtaatgtgttgcttgtcactggctcctcttcagataattatcttgggttttcaacagtttgactctgtgtcttggtgcagtttcctgtgcatttactctgcttggggatccttcagattcttagatacgtgagtcactgtctttcacaaggaagtatttggccattatttcttcataattttttaattgtggtaaaataaacataacatgaaattcactgggtttttttgtttgtttgtttttgttttttgaggcagagtctcgttctgttgcccaagctggagtccagtggtgcaatcttggctcactgcaacctccacatcctgggttcaagcaattctcctgcctcagcctcctgagtagctgggactataggtgcgcaccaccatgcccagctaatatttgtatttttagtagaaatggagtttcaccatgttggccaggatggtcttgatctcttgacctcatgatccacctgcctcggcctcccaaagtgctaggattacatgtgtgagccaccgcgcacagccccattttaatcattttttaggtgtactgttcggtggcattaagtacattgacaatattggctaccaccactatccattttcagatctttctcttcattccaaaaaattatgtacccattaagcaatcactcctcaacacttctatcttcagcccctggtaacttgtaggtagtgtccatgaattttgtcagaagtagaataataaaatacgttgttttgtgtgcgtctgccttatttcattaaaagtaatgttttcaaggcttatccatgttgtagcatgtatcagaatttcattcccttttatggcttaataaattctgttgcatgtatgtgtcacgttttattcattcatctattgatgaacatttgggctgtttctacctcttggctattgtgaatcatactgatattgatgatttttttttcttttttcttgagatgcagtcttgctctgttgcccaggctggagtgcagtggcgcgatctgggctcactgcaacctctgcctcctggattcaagcaattatcctgcctcagcctccaaagtagctgggtactcgccgagtagcctgccaccatgcccggctaatttttgtatttttagtagaaacggagttttaccatgttggtcaggctggtcttgaactcctgacctcaggtgatatgcccgcctcagcctcccaaagtgttgggattacaggtgtgagccactgcgcccagcctgaagacagcattcttagcatgaaggatgcaaagttgaggcaaaggagatctatccaaaccaacctcattacactacggcttctgagccacttctctacctgattaaccaccctagcccacacccttggttttatcccattagcgcagtttacttgtctgtccaattcagtttataagtgtttggctcttaactgcttttctggcttgtttccttatgaggaaccccatgccacataaaactttcattaaacaaatacatgtgtatgctttaatcttgttaacctaatcgtatgtcggtgtaattatcaggcccagcaaggatcctaagatgatgaaggtgaaatcttgttgcccctacaatatggacattggatgcaagtgtctgtgtgagttcctgctttcaattctcaggaattttccgaagttgttttcttcctcattttctccttttgggactccagctgcgccacaggactctgaagttcctgtttcatttttctaatgtgtttgttttccagtttgtatgacttctactgatatatcttaaagttcactaactcttctgtcctcttcatctgtggaatccatttagtgactccttaaaatccagatgtctgaggtccttaggaaaacaggtgcttctccctgttgtagcttgaatttgctctgaatgtggtggtcccctaagccaataacacaatgcctcctggcctgccctggccacccagggaggaatgaagggagaggtaggtgtagtggtaataagccttgctgtgcacagctttgtgtaataactgaaaagggtgatgtgttttcctgctcccatccccaagcctgatttcttcaagatgcagtaactgggacgggtgcagtggctcatgtctgtaatcccagcactttgggaggccaaggagggaggatcacgaggccaagagttcgagatcagcctgaccaacatagtgaaacctcatttctactaaaaatacaaaagttagccgggcgtggtggcgcgtgcctgtagtcccggctactgggaagctgaggcaggacaattgctcgaacccgggaggcagaggttgcagtgagccgagatcacaccactgcactccagcctgagcgaaagagtgagactcggtcaaaaaaaaaaacaaacatgtagtaactgacaccccccacacatgccctcccctccacctcctgttatttcattagaaaccctgccaaggaacaaggaaatcctacaaagaaggtgtctcaggtacccatcagcagccatgcagtgatgacaagtgggtctgatgccattaaaaggttgttttcaaaccaccttctgttgcaagcagaacccaattgcacaggaatccaagctccatgatggagctttggccattgtttttagttaccaggaaggaaaatggcaagattgagattaagcctggaggcccggcggggacctcatggctgtgaagaccctggactcctgtgttgctggagatagtgtttgtgctctcacatggtctgctcagccgtctttctgccattcagcacaacggaaggacctagtgtgtttccagggtgggagcctacgagtggtggactctgactttgacattcgggacagatttattccttaattttcttccttacatacttggttcatctgagggcctcagactccctctccaacagccttctaccctctcccatttccacattttcatttttgagcttccttagctaagtggttttactttcttccctttccatctctctctctctctttatatttctttctctagatttttaaaattctgtctctctcttttctccaatttctccatttccctcttttttttttttttttttttttttttttctttttctaagtcagggcctgactctgtcgcccaggccaagtgcaatggcatgatctcagctcactgcaacctccacttcccaggttcaagggattctcttgcctcaccctccaaagtagctgggattacaggcacacaccaccacacccaggtaattttttgcatttttagtagagacaaggcttcaccatgttggccagactgatctcgaactcctgaccgcaagtgatcctctcccattttggcctcccaaaatgctgggattacaggcgtgagccactgcgcctggccttacattgttattctgcacacattggccattgcgggcatcgttccttacctgagtgaacacatccatgcattcctaatatgtgtgtcctgggaaacctgggtttggagtttggagtttggagtagagaggccaagggtttgcagtcaggcaggttacttgcaaaatatttacgtatcagtcagatacattggctcatgcttgtaatcccagcagtttgggaggctgaggctgggggatcacatgaggtcaggagttggagaccagcctggacaacatggtgaaatcccgtctctactaaaagtacaaaaaaattagctgggcatggtggtgcatatctgtattcccagctacctgggaggctgaggcaggagaatcacgtgaaccagggaggcggaggttgcagtgagccgagattttgccactgcactccagccttggtgacacagcgagactgtgtctcaaaaaaaaacaaaaacaaaacaaaaaaaaattatatatatatatatatatatatatattatgtattgtgctaagtttcttctttgtaaaagcccttgggggactgttaagtgtgtgtctcagcttggatttgggtttttttagaccagagatccctggtccctttggaggtgtgagtatgagggtatttgtgtctcttgagaaggtctaagagttgccatcagtttggtggcagggtatgttgtacttagagatcttgtcagaatggataactcattttacctccatcacttacgaaatgacttttatcagctacattaaaatgctagcaatgtcatactacattctcataaatactgggaattaactaatgactttcttgtccaggtatttataggctttggcaaggcagcagtacacaaaactggtcccattcatagtaatcttgacgttaaactttggagccagagtacaagcgaataaataaacactaggaagaaaagtaaatgcggagaagaataaatgctgtgaggaagagtaaagttgaggaggggaacagacagatgggattgacccgttcaacctgtgcagtgtacagcgtatactcttttttttttgagatggagtctcgctctgtcgccaggctggactgcagtggcggcgatctcggctcactgcaacctctgcctcccgggttcaagcggttcgcctgtctcagcctcccagatagctgggactacaggcacctgccaccacgccctgctaatttttttgtattttagtagagacaggggcgtacactcatttttggccactttacctttttaggaaacaaaatcatcacagaaatcctcaagaggcagctttcctgtacatttcagtttctcctaaaacagaacagggctgggaatgcttactgaggaatcatcaaagcatttctttctgtcatgacaagagcaattccagcttgctccatgagaccctgcttctctcactgtatttggttttcaggttgcaagatttgaagaacacttgtcaaaactcgacggttatttctgttttcaaggactgtttgatctgcattttcttccagtccattcatttctatctggtttggcctccaaggtcttaatcttttgcccaagaaaacgcttacatttaagcaacatgagttccttgatttgtctgtagcccaatgctactttcttgagttcagaataaaagctgattattattattatttattgttattattattttgagacagagtcttgctctgtcacccaggctggagtgcaatggtacgatctcggttcagtgttacctctgcctcccaggctcaagcaattcttctgccttagcctcaggagtagctgaggttacaggtacccaccaccatgcctgacaaatttttgtatttttactagacagaattttgccatgttggccaggttggtcttgaactcctggcctcaagtgatctgcccacctcggcctcccaaagtgctgggattacaccagccttgggacttgacagtttttttttttttttttaagatggagtttcgcccttgttgcccaggctggagtgcactggcgcgatcttggctcaccataacctctgcctcccaggttcaagtgattctcctgcctcagccttcctgagtagctgggattacaggcatgtgccaccatgcccggctaattttgtatttttagtagagacggggggtctctccatgttggtcaggctggtctcgaactcccaacctcaggtgatccgcctgcctcggcctcccaaagtgctgggattacaggcgtgagccaccatgctgggcccttgacagttattttgacctaacattggtgataatttttctctacctcaaccaagaagatggcggattggagcacttttttcatagattgaccagtcttcccaacaacactggaggccagtcatttactttctgcagagaaagagacatgtcaaagagtcaacttaccagctggaaactgggactagtgtcaagtgcttactctgacattcagctcttgtttcacctcttgacccctttcatgcctgcatcaaccagtggatctgctgggctcagagcacatgacaaaggggcttgtggtgttccacttggcttcctgaaatcccttcctttcccctggcagtgcttccacgcaggactttgagtgtgtagtcggggcagtttacatccccaagtgaaaatgctgaacgttcagcaagccttggtcaaaagttttcctaggctcactagtgaagaaatagcaattactcactggctattgccaggattgagaaaaagaatgtgtaccctagaggccgggcccaaggggaagagagtactttctctcagcattgagtaaaatcggccattttttaaatgagccttgggaaccagcataactggtccctttgtgcccaatttctccatcccgataatgaattccatggataacctcagtggcccatgacagttgcctctcattgcacttccctgccagttctcagaaagaaagtgtcacacagtctctggagggaacttctaattacaggaacacagtctgcttgtctgagtcttgttttcagttcttggaccctctccagcagggaaaatctctgtcttgtgtaacctttgggtaacatccaatccactcaggaattcttccctgctagggaacctattgtatatacccaatgaatattagctaagtgccttacacttttaattaggttttgggaagaaagatcaataagacaaagtactgcccttaagaaagtaaaggtctaggagaagagcgatattaacagtaaataagacacctagtatggcaggtgaatccatttgggaggccccagatgaggaagatgttgaactgggggccatcaagaaaatctaagtagaagagatgatgcaagctcagtgtagaaggatgattatgattgtgattatgattatttggagatggagtctcgctctgttgcccaggctggagtgcagtggcgcgatctcagctcactgcaacttccgcctcccgggttcaagcggttctcctgcctcagcctcccgagtagcagggactacaggcacacgctgccatgcctggctaattttttgtattttagtagagacaggttttaccgtgttctcaggccagtctcaaactcctgagctcaggcaatctgcccacctcggcctcccaaagtgctaggattacaggcatgagccaccgaggcctgccttgtagaaggctcattaagagttcaggagcagaatcaaataagcatgctaatcctgagtgcaaaggcactgaaaaaatgacagtatattacattctgtagataaaagacaatctttggagtaagaggcagacttgaaaggtaatatgggacagattggagaacacacacatttcctttattctctctctttttttaaagactcggtctcattctgtcacccagattggagtgcagtggcatgaccatagctttctgcagcctcaacctcctgggtttaagccatctgccaacctcagcctcttaagtacctggactataggcacacactaccatgcctgactaattctattttttttatttttgtagagacacagtcttgttatgttgcccaggctagtctcaaactcctgggctcaagcaatcctcctgcctcagcctaccaaagtgctgggattacagtcatgagccactgtgcctggctcacacacatatatctatatgttagtctactagtttcaatgtaaatgttagttggaaatcgatggaaacaaattgatattcaatgaagtttgcagttgagcaaggtaactggttcccagttgcggaatggaatgaagggtcctgtttctatgagcttttgtttcatagccacccaaaacatggtggtttaaagcaaccaccaggccgggctcagtgtctcataatcccagcagtttgggggccaggcaggaggattacttgagtccaggagttcaagaccagcctgggcaacatggtgaacccccgtctctcaaacaacaacaccccaccaccttttatttagggtttgtttgttgacaatttgggctgtgcttagcctgagagttctcttgactggcttctgcagtcactgtctaggtggggtgggg

SEQ ID NO: 385 - DNA, 52557 bp, Homo sapiens
ggggactttgtgtttttatgtttcctcaaggtctggcataatcccttgcacatactaagtgctcagctatttactgaatgagtcagtacctaaaattaatcatttttatccaaaattttgtttctccttttctattctctttgttgggaaattgtgtcactgcctacttagttgctgccagtagcatttggtatagttgaccactccctctttctcgaactattctttccgaggtttatataactttatagcttacaggcttttctcttttatccaaccattttatttcactatacaatgttaggtatcctcagggcttgatttagatccccttcttctcccagacctttatccaccacattctcctatttaacaaaactgacagcccttcttccttagtgtctcttaaacttttcagtcccattgcttcaaggtgccatcatttcttagctagattattacaataacctccctttttctgttcttatgtctgcttatgcatactgcttcccccatcccccacactgtgtatagaatgatctctctgaaaggcaccctgcataaaatccttccccatcactttcaggctaaaatacagaaacctttctgttcatattagtgggtcagtctcctgctcctgaattcccttagcattttgtttctcgctctataaagacctataatgtaataacatctttatagtatttgagaacttattttctcctctaaatttataagcaatgttaaggtaagcccttcatctttgcttatcctctaataccaaacaaacttccataaaaatagaaggatctcaaaaactaaattgaaaaagcagtctagttgaaaaatagaggtgctaaagtaagttgatggctcttaaatgatgccaggacattcttagagtagtgatggctctttgggtttggtggtaacttagaagggaaaaaaaaaatctgcaggaccacatgaccgctagggaaacaggcatcaccaaccattccagaaagctgctttgaacaagccttatataagaaagagagaaagcacttttcccaattcatttcagaattctttccaattgcagtgcttgctacctttgtaccataacccaaacacatcatgtggtgatgactgggaaaataggaacatgagaatcaagagctgtgagccaggcacgttatccctgcccttaactggagaaattttttcagctcaagagttcctgttttgggtctcagtaaaggagacagattaggaaaaatcagagcagaagaagaattaggagagcattgtgttgtggaacccaggaaacaaaaagtggctgtaatcataaaatactgcatataaattagaaaaagagaaatgaaaagccattgatactacagataaaaagttatcaaggattttgaaatatcgtttccatagaagaataaaaacaaaatcctgattctgagcagttgaatgaaagattgaagaggggaagtagtaagtccattttggttaaggaaaagaaattgacatcacttaatgatataattgacatgtaaaaaaactgacctcctggggggccgaggcaggcagatcacaaggtcaggagatcgagaccatcctagctaacacagtgaaaccccatctctattaaaaatacaaaaaatgagccgggcatggtggcgggcgcctatagtcccagctactcgggaggcagaggcaggagaatggcgtgaacccaggaggcagagctttcagtgagccgagatcgcgccactgcactccagcctgggccacagagcgagactccatctcaaaaaaaaaaaaaaaaagacataatgatataacctcattttcttctatgttttcctgctttcctaccaatatctgtaaaacattaacgtcattatttaaaaaaatatgtaacctagataatatagtaatcagacatcattgttaaatttacagcttaaggaagtaagttgtcttttcaatcagattagtcattctgtttttttagtaatagttatatattaatgaagtgaaactttataggtaggtatacatcaatgaaatcttaggcttttaccatctatattgcatacttctgacattatatcttattttccttaggttctaagaattttagatccagttacctgcaaagagagttcacctgataatccattttttgagtcttcaccaaccaccttacttgctacaaagaaaaatattggacgatttcatccctatactagatatgaaaatataactttcaattgctgcaatcactgccggggagaactgattgccctttaacagtcaatatgttggaggcatgctaaggtacttccttattacccaagagtcattattatttgggagctggggttcttacaatgctagaaataatatcacttcctatttacataatgtatacacccaaagatattttatgtactagactccagattaccctttcttaataaatatctcagggtaaggaaagaaagaaactgtatagatatatttaaaatagagaatactttccaagcaatacatgatacttttcctaaaagactctaaaagaaaaagattctgtaactctcttttagcaccaaattattgtttatcttgctggatattttatatgaacagtgttaatttagatgcactaaagcaaaggtaggcaaactacaaccatgagtcaaacatggccacacccattcatgtgctattgtctaagctggttttgcactacaactgcagagttgaatagatgcagcagatcctttacagaaaaagttttctgacctcaattctaaagtaattgtagtagggagctggaggactttctttccctttatggtaattttttgagctacaaaagagccttgcagaaatgggtgaagggattaatcttttaaaaataaatgctatatattaggaaaataaaaaatattttagagccaagttaacaagtacttcagcaaaacatgctagttttatgcaggggattctgtattccaaatggatacaatccgacatatataaaagaaacagattcttaactattgactcttatttagcaaatgcaacagacaagaatatccaacttgatatttataaaaggtagactttttccaaaagtgtataagctcaaagaaaaaatgcaacctgtcaattaatatatactatgtaatatatattattgtgtatttatgattagccatcataaatgcccattgcttggcctttaagaataatcacaaaatatttatattaaattatacaaatttgttgcagaagtgcctgtgagagaaatcttcaaaagacaaacctggtcaaataataataattttaatgtcaatgattttttttgtctgactcatctgagttatatttagttttcaagtggcaataaatttatctaccttctttattgcgactattccttttttcccccagaattagtgctttggtttaggtctttgtctagcttaactacttccaattgattcttcagccttttcttttaggtttacttactataaaagtctcagaagaaagcataaggggaaagcttcgtgacattgtatttggcaatgatttcttgaatatgacaacagaagcacaggcaacaaaagaaaaaatagataaattgaatttcatcaaaatttcaaatttttgtgcattaaaagatgcagtgaaaaggcaacacagagaatgggagaaaatatttgcaaatcatatatctgataactgtctagtgtccagaatatataaagcactcctacaactcaaccaccaaaaaacaacccaataaaaattagcaaaggggctgggcatggtggctcatgcctgtaatcctagcactttgggaggctgaggcagtcagatcacctgaggccaggagttcaagaccagccgagccaagatggcgaaaccccatctctactaagaatacaaaaaattggcctggcgcagtggctcacgcctgtaatcccagcactttgggaggccgaggtgggtgggtcacctgaggttaggagttcaagatcagcctggccaagatggtgaaacccccgtctctactaaaaatacaaaaaattagttgggcatggtggcgggcacctgtactcccagctactcgggaggctgaggcagagaattgcttgaacctgggaggcggaggttgtagtgagccgagatcgcgccgctgcactccagcctgggtgacggagcgaaactctgtctcaaaaaaaaaaagaatacaaaaaataagccgtgtgtggtagtggacgcctgtatacccagctactggagagggtgaggcaggcgaatttcttgaacctgggaggtggaggctgcagtgagccgagatcgcgccattacactccagcctgggcaacaagagtgaaacttcctctcaaaaaaaaacaaaaacaaaaaaaattagcaaaggacctgaatagacatttctccaaaaaggatatatagatggccaataagcacatcaaaagatgctcagcataactactcattaaggaaatgcaaattaataccacttcacatccattaggatggcagttatcaaaaaagcaaattataaatgtcaaagatgtggagaaattggaacccctatgcattgtttgtgggaatgtaaaatgttgaaaacagtgtggcagatcctcaaaatattaaacatagagttaccatatggcctagcaattctgcttctaggtagattcccaaaagaaagcagaaactagaataggtatttgtacaacagtgttcacagctgcattattcacaatagccaaaaggtggatgtaacacagtgtccatcgatggatgaatagataaacaaaatctggtatatacatgtgaagaaatactattcagccttaaggaatgaaatttgatgctacaatgtagatgaacctttagaatattatactaagtgaaataagtcagacacaaaaagtcaaatgtcaaatgattccatttatatgagttcctagaagagacaaatttgtagagatggaaagcagaatagtggttatcagggactggagagagtgtagaatgggaagtttttatttagtgggtatagaattagagattgggatgacaaaaatgttctggagataaacagtgatgatggttgtacaacaatgtcagtctacttaatgctactgcattgtacatttaaaaaatatttaaaatggtaaattttacacgttacaattaaaaaactaaaaaaaaattatatacacttttgtaaccacaaactcgtggcacacttctgcaactgttggtttaacagtgtcaataacaataataataaagataagagttagtgagctaaatttaaaaaataaaaaagatctcaaatcagcaatctaacataacaccttaaggaaataaaaaaagaactaaacccaatgtgagaagaaggaaggaaattaagattagagtgcagacaaatagagaatagaaaaacaagagagatcaaagaagtcaacagttagttctttaaaaagaaagaccaaattgacaaatctgtagccatactgactaagaaaaataaaacaggtaaaactaaaatcagaaatgaaagtggggacattattagtcaccttacataaagaaaaactgtacaccaataaactaggtaaactagtttacagacaaattcctagaaagacatgtattagtccactctcatggtgctacaaagaaacctgagtaatttataaaggaaagaggttttcaaaaagggagaattattctgaggctagaccatgtgatgcttttacagtgcacttaaaaaaaattttttttcccacacaagagatttctaagtgtctaaattacactttttcttaaaaaacccagagtagcttctgttgcaatagctattaatgaagaaaacagaattcagtcaactgagaagaaaaaaacttttgctcaaaaagacaaggtcctaagaaataaacaaaaacataaaggccttttaaatacaagcatgcacacatgcacacatacatttacatatcttggatgttagcttttaattaagctgacttaaccattgagctcctaaaaattatattttccttcccagaggcctctcagcaggaatggacccaataccttccatttttaagtttacatggtatcaaaaggagtaagacagataaacaagtggagacaaattttggacaacacaaggggaagtgcactcgggcaaaacagattcaaaacctgatctcaatcaaaatgcaaagcgggtgtataaccaagccttattattgcttcccgtggcagtgccagacaaatggtttaacaagcctagatgggaaaacaataggctcccagcataccattcagttaactcaccctttgagttcgtccgctcctgatctccattctaacccagcattgtaagggttgtgcacttttgagcacaggacagccttcaagggggtccctgggaaaatctcacctgcagctgctgggatccccctaaagactgtctccttgcaagccactggccactgaatgcagcaccattccagtctctcctggctggcacgccaaattttgttcccagaccaaactgaggtttgggctgctgtttctcgtggcccaataacgagatgcaaatgaactggggaggaagggagttttcatttctgcaaccggttacagggagaaggcctggaaattatcaccagaccaattcaaaattacaaagttttccagagcttatataccttctaagctatatgtccatgtgtaagtgtgcattcatctaaggatgtaagtgattaacttcttttaatctataactaaggtctgagtcctgaaggccttcctctggagcctcagtaaatttacttaatctaaatgggtccaggtgctggggcagttacccttgtctcctgctaaatcacggaggtttggggagttccttcagacccccgataaacttgtttgtggaggcctggggagtttcttcagacccacaataaaacttgttcaatcctaaatgggccctgttaagaattcctgtattattttgtcatgctttaaggcccaggaaagacctaggcaaaactcttgatgggcttttgtggcatcccagcctttgtataaggagactgacttttaatatttaacttaacccttcagtcagtagtgaaacagtcgttatggaggcctgcattagtgagacctggcctgccacaatcctgtgttcatgtattgaaagactgtattattaagatggcagtactacccaaagcagtctacagattcactgagagccctatcaaaattccaacagcctttttgaaaaatggaaaagcttaccatcaaactcatatggaattgtaaacgccgtgaatagccaaaacaatgcggaaaaggccaaagttggaggactgacacttcccaatttcaaaacttactataaaactacagtggtctaaacagtgggctgttggcacaagtacagatgatactaacatacagatcaatagaatagaattgaggcttcagaaataaacccatacatctatggccaactgactttcaacaaatgatgctgcaataactgaatgtacacatgcaaaaaaaaagttgaacctctatgtgatattgcgatagaagaaatacatattttggtcttgtaccagtttcctggcacatagctcctaaaacccttgcaacatcccaagtccccaagctgtgagtatctttgtatgctaatgaaatgactaatgtctgggggatctggatggggggaagttgccaggaggaaccaaccaagtaattagagagtagacctccaggggagggggaagtcctgaaggttaagttgattaccagtagccaatgatttaatcagtcatgccttcataatgaagcccctccataaaaacccaaaaggtttagacagctttctaggttgctgaacatgtgcaggtaccgagagcatggaagttccacgacccttcctccataccttgccccacgaatctcttcaatctggctattcctgagttgcatccttttaaaaagagaaacagaagtgtttctctgagttctgtgagcgattctagcaaagtactgtgggaactgtaaccaggggacctattatttgcaattgatgtctgaagtggggggcagtttcatgggactgagcctgggtgtatggtctgcattaactctggttagcgtcagaattgaattgtagaatacctacttggtgtctgcagagaacggggaaattgcttggtcttggggaaaacaacctaaacatctggtgtcagaagtgatgtactgagtattgagagtatacaaggaaaaagtttgttttttcttactctacctcacgccatatataaaaattaagtaaaaacgaatcaaactggccaggtgcagtgacttacacctgtaatcccagcactttgggaggctgaggcaggtggatcagctgaggtcaggagtttgagaccagcctgaccaacatggcgaaaccccgtctctactaaaaataaaaaaaaattagctgggcatggtggcgggtgcctgtaatcccagctactcagcaggctgaggcaggagaatcacttgaacccgggaggtggaggttgcagtgagctgagatgtgccacggcactccagcctgggagactgtgagactgtctaagggaaaaaaaaaaacaactttgtctcttttttttgagatacggtctcactctgtcacccaggctggagtgcagtgatgcaatcttggctcactgcaacctccacttctggggttcaagcgattctcatgcctcagcctcctgagtagctgggactacaggtgcatggcaccatgcccaactaatttttgtatttttagtagagacggggtttcgccatgttggccaggccggtctcaaactcctggcctcaagtgatcctcctgcctcaacctcccaaagtgctaggattacaggcgtgagccaccgcacccagccagaagtttgtcttttaaactttgccagaatgcttacagtgactgtccattctccatcacacttgtatgcttacctttgtccttcaccccttacatgctcttacatgtatcagaagtactattcctctacacactggattcttgtatactcttaaatatcacatattctaccaaggaatgtaatctttataatataactgagagaaaggattttgcaaccatacagatcagtctatgtgaacaaaatattcatgtctatatagtttccttctctgcagaacgacactaatagggttgtcatatgattacattatttatataaagcatttataatacattttaaaatgttttaagctctcaataaaagttggctaattttgtaacatacctacctaaaatagtattacacataattgctattttatcatttcaagttttatttcagattcggggatacatatgtgcgttagttacatgggtatgttgcatgttgctgagggtccgggtatgattggtcccatcacccaggtaaagaacatagtacccaatagttagtttttcaacccttgctcccttccctcacccccaggagtccccagtgtctactggggacatctttatgtccatgaatacacaatgtttagctctcacatatagggtgtattttttaaggtactaacgggtggaattaggcctaccctattgcttagcttgccatgattattcaaatccaaagttgacataaataggactttaaggccttgaaccaggcttgtttaaggagtcactccttcagccttatgaaatgttccattgtaattttttaaaaataataggaagtatgaatagaaatctgtacctttcttgtgttttctcctagaaacgttaataaaataatttagaagtagaaggacatagaattcattcgttgttcaatttgttgcacagactaagagatggcacaacacattacaacactgtgagaaaaaaatttattttgttctagtattaaaaaaacaaattcactgtcaataaaagataaataccatttccataatttagaatacaaccaaagtacacagaccctaagaaatcatatccaaaattttgatagcagctgcccactgaaatatttaatagaaactttcagttataatgatcagtaaaacgaaaaggtttggcttctgacatatataggtggtgctgtaactgtttagaacgcttagcttctagtcggagctgtctagttctctctctgacagcttgttgctctgccattttttccatccgtttccttcttaaccatctgtagaaacaggcatgatcagatttggtgagtatcaacctgaatacactcttcatgctataaagttactattatagacaaaataaatggacatttctttacaatgaaatactgtcacagcacaaatttttaagtattaactgaaaaatgtaaagattacacccaaggctcatacaagaaaggaccgttagatttggggtcaaatgtttgaaattgtctgtcttacaatgaaactgccaacttaattggttttttaataataaacactattttatgtgtgctgtagatcctattctttttttagaaacaggatttcttactatttggtagattccaaataacttactctttgtaactagctgtattctaaaacattacttagctaggttaagaatactatcatgcagaaatgctgccttactcttcttataggtaaattatagagcttttaagtccacaaaatagttcttaaaatgaaaagtaagccaaacatgaaaacatcaaaagcaggaaaggaaaagtccacattctaacaaattcaagtcttaaaccttgtttaaataatagcaaaaataactgcatatacatatatacctggtatgtaagtgtgtatgtggtatgtttgtgtgtgtgtgtgtgtgtatatgcacatacatacacctggttttgttgttttttttttttcagaataaacaactaaataactgtattagaaaaaaaagaaacttactaaatatcataatctgatgatatgtggtcctgaattggctactagtttaagcaaataaactgtaagtcatttatgggttagttggggaataaatggatatgggctggatattcggtaatatcattaatgaaaagcagattgcagaaatacagtatgatctcagtattttgaaattgtaaatacatgtacagacaaatacttagacagtatgcatactggtgttaacagtcacaatttctgggtgatgaaaatgtaacttgaaaccgctccatttctacaatgcacatttactgtttctgttataataaaagggtatgttagaaaaacaaaaaggaggctgggcatggtggctcatgcctctaatctcagcactttgggaggccaaggtgggcggatcacttgaggtctggagtttgagaccagcctgagcaacatggtgagaccccatctctacaaaaaaaatataaaaattagccaggtgtggtggtgcacacctgtggtcccagctacttgggaggctgaggtgggaaaatcacttgaacctgggagggtgaggttgcagtgagctgagatcatgccactgcactccagcctgggtgacaggaaaagaaaaaggaaggaagagaaaaaagaaggaaagagcaaaagagacgaaagaatgaaatgaacttcaaacaattggactcaatattcacatttggtcccccaactctccccacacttgctagcaaaaatatgaagccacatctgtattgtcagaattaggcaatgcagtgtcttacccaaataactaaaaaatatcaggtttgccttaaattaccaaaatatgtacccaaatctcctttggtctatacagattttcctccttagtccacctgcctttcttttactggtaaatgcaacttttattggttgcatttatttgtaaattcagtttttctgagggctatgtaggagaagctgtaaccaatcttcaacccatttctcacagaaataagtaaacaataaatgataaggtatcaaaggctatcacactggtgccataagaaataatttaagtattgaaaagtatcttgaagaaaaattggtatgcatatatatatataactccatatatataatatatataatagagttaaagaattatacatttttaaaagcatgaatttaaaattgaataggtacgtgctgtaagagaaaacattttgagggttttttttttccaatcttaattgatgatataacttttaaaatgaacatgaggaaggaggaggggggaaatgccctgcctttaacttactgtttaaaggccctttcccggccttctgttcctttaaggaagaataaacattcctcttgctttcttagttcttctgtctgtctttctttcatctgctcttcgtgcttttttttaagccataatcgaaaagcttgttgtggatctctgttttcctgctgattagaaaaacaagctttacttagtttagataaacaagaactacattttgaagccctgcttatgggatcctacaagaatatatttcctactcttcaatttttcataataatgccagcctcattacctgcattcctagtatccaaaccaaatacatcacgcttaagttttaagaatatctttcagcagttacttaaaatggctaagcccatttttcaaaactgtagttcctattgtaaagggtggccataaggattttcagtcataagaattttcttataaagatagcagccatgataattttaacataagaaaaagctagtaggagtggcttatttcgtggtccctcaaagttcatgatggatagtatcttcagggaattttcaaaagttcaaagagctcttatttggaggaataaaggagagaaagaagacagatttggtactctttacccttgggaaaagtgtcacctcatgtggattcctggctagaatgcaaaaggaaaagatacattcatttaatacttcccccaaatataagctttgtgattgagcttatatcttgcatttccctcatctgttgcctatatcttgcattttttcccttgtttgtaacccacattgccaaatatgctctagtctaatttagaagattattcaggatctttgatgcacaactgaactttgtggagaagacccctggatctaaagaatcattgccaaacacctggaagtctgggaattgctagagatgacataaaaatgttcaatcgggagttatagatcaaaagagtccagatacaaagtaatagataggaggaataagttctggtgttctattacacagtagagtgactacagttaacaataccgtatatttcaaaataatgaggagaggatttttgaatgttctcatcataaagaaatgacaagtgtttgaggtaatatgctaattacacaatgtgtacatgtatcaaaacatcacactgtactccataaatatgtgaaattatgtgtcaattaaatacaattttaaagttaaaatatttttaaagattcaaggattcagggagcaacaggatacatgggtatccccattcttttgttctttcaacagatattcatagtatttactacatagcaggcactaaagtactgggttgcattaataaaattaaggttccctctctcacacattctgtactgtacaatacagtaaccacaagtcataagtggctatttaaataaaatttaaacttcagtttctcagtcatactagctacatttcaagtgcttaacagacacacatggctagcagctactctaatggacagtgcaaatacagaaaatttccatcatcccagaaagttctattggacagtgttctgcacagacaggataaaaataagtgactgactgattgattgactgatctgtctgattcaaaagaaaatatgggaaggagggtaataaacacagcagtgaggagaaaggatggtatttaaatagaaagggaggaagttatgggatatctggagaaaaacagtggtaacaataagagcaaaggagctaagaagggattgtgtttggcatgatcaataaatagcaaagaagtcaaagtgaagctgtagcaaagtagctgaagagtggaagatgaagtcagggaagtagtagggatcaggtaatgtataaccttgctggccatggtaggaactttggatttcattttgagatgagaagccattgggggtttctgagcataagtgacacagtttattcaccattttagaaatatcattctggctgctatgtggaaaactgaatgagggagaggcaaggtagaagggggctgggttattaggcttttgtaacagcccagccaacagaagaaaatagtggtttagattagggtagtgggactctgtatatgcactgaagatagaaccaacataatttgctcaaaaattgaatggatagttttatgtcatgctttaaatgattattttttaaattattccaggtttattagtataataaaaattcaagaaaatatatttttaaaacaaggtaaattacagcagaactatcatcagaatgatagactgcattggtatgcaaatatgtcactgcataagatcatagcaaataactctcaatagtggagggaaccaaaataaaaaattagaggaaaataaaaaattctaaagataaaatatgaattatacacataattagtaatggattaaattatctgattataaaaaaggataaatgactgaattggagacttttgcatccatccatgatatcataattggtatcagatttacccttctgccctaattagctataaagctagataaaatgtatgcagcagcttgataactgagagtaagaaaaaacatgatataacccccatattcaccctggctctgtacttggtgacactttccagacaacggtataggaaggaggagtcatagcatcaagcagtcactagtctcactgggctcatgaaacagataggagtctggggctgctgagacagctgaatttccagggcagggtactagaaatgaagcagtcatgtggagggatgctccaagagtctgtgtgggggtttcccttgggtcttggcaaggcctgggctgcacatgtgtagagtgaggctctgtaaggtctaacagagagtagctgctgttaatgaagaagataataaaggttgcatagttttggagacattggagttccaatccaactatagtgggaatacttcattgcttaccttggtcaaccacttacaaccctaaaaaggccatgctttggaaataagggtcatgtcctagagtaaggaccatgctctaggactaaggacaaaagcaaaataaacccatcctaacaaagcataaaacaaagtctgacaggatcaagagtattccttactaatctaactgcctacaagaaaaaaattcaataccctttaaaggaaaacagtgtattctatatttccttacaacttttatattgaaaagatccacagtctattaaccaatttaaaaaaaatcactggatatctaaagaaacaagaaaatgtgacccataatccagagaaagaggccttcaacagatcgatcctaagatgacatagatattggcatttagatacaaacaggtctaatatttaagaaatgaaaagatgaatataaaaaaggtctaatatgtaagaaatgaacaggtgaatataatgaataaaaagagaatctcagtaaagaaatggaaatttaaaaaaataaactgataggaggatccaagatggccaaataggaacagctccagtctatagctcccagcgtgagtgatgcagaagacgggtgatttctgcatttccaactgaggtaccgggttcatctcactggggcttgtcagacagtgggtgcagcccacagagcacagtggggcatcgcctcacccaggaagcacaaggggtcggggaattccctttcctagccaagggaagctatgacagatggtacctggaaaactgggacactcccaccccaatactacacttttccaacggtcttagcaaacggcacatcagaagattatatcccgcacctggctcagagggtcccactcccacagagcctcactcactgctaacacagcagtctgagatcaaactgcaatgccacagcaaggctaggggagagatgtctgccattgctgaggcttaagtaggtaaacaaagcagctgggaagctccaactgggtggagctgaccacagctcaaggaggcctgcctgcctctgtagactctacctctgggggcaagacacagctgaacaaaaggcagcagaaacttctgcagacttaaacgtcccagtctgacagctttgaagagagtagtgcttttcccagcacggagtttgagatctgagaaaggacagactgcctcctcaagtgggtccctgacgcccaagtaggctaactgggagacacctcccagtaggggccaactgacacctcatacagccgggtgcccctctgagacgaagcttccagaggaaggatcaggcagcaacatttgctgttctgcaatatttgctgttctgcagcctctgctggtgagacccaagcaaaccagggtctggagtggacctccagcaaactccaatagacccacaggtgagggtcctgactgttagaaggaaaactaacaaacagaaaggacatccacaccaaaaccccatctgtacatcaccatcgtcaaagaccaaaggtagataagaccacaaagatggggagaaaccagagtagaaaagctgaaaattctaaaaatcagagtgcctcttctccaaaggaatgcagctcttccccagcaatggaacaaagctggatggagaatgactttgatgagttgagagaagaaggcttcagacaatcggtaataacaaacttctccgagctaaagaaggatgtttgaacccatcgcaaagaagctaaaaaccttgaaaaaaagattagacgaatggctaactagaataaacagtgtagaggagaccttaaatgacccgatggagctgaaaaccatggcacaagaactacgcgatgcatgcacaaccttcagtagccaatttgatcaagtggaagaaagggtatctgtgattgaagatcaaatgaatgaaatgaagtgagaagagaagtttagagaaaaaagggtaaaaagaaatgaacaaagcctccaagaaatatgggactatgtgaaaagaccaaatctacgtctgattggtgtacctgaaagtgacggggagaacggaaccaagttagaaaacactcttctggatatgatccaggagaacttccccaagctagcaaggcaggccaacattcaaattcaggaaatacagcaaataccacaaagatactcctcaagaagagcaactccaagacacataattgtcagatttactaaagttgaaatgaaggaaaaaatgttaagggcagccagagagaaaggttgggttacccacaaagggaagcccatcagactaacagcggatctctcggcagaaactctacaagccagaagagagtgggggccaatattcaacattcttaaagaaaagaattttcaacccagaatttcatatccagccaaactaagcttcataagtgaaggagaaataaaataccttacagacaagcaaatgctgagagattttgtcaccaccaggcctgccctaaaagagctcctgaaggaagcactaaacatggaaaggaacaaccagtaccagccaccacaaaaacatgccaaaatgtaaagaccatcaaggctaggaagaaactgcatcaactaacgagcaaaataaccagctaacatcataatgacaggaccaaatacacacataacaatattaactttagatgtaaatgggctaaatgctccaattaaaagacacagactggcacattggataaagagtcaagacccatcagtgtgctgtattcaggatacccatgtgcagagacacacataggctcaaaataaagggaaggaggaagatctaccaagcaaatggaaaacaaacaaaaaaaaaaaaaagcaggggttgcaatcctagtctctgaaaaaaccagactttaaaccaacaaagatcaaaagatacaaaaaaggccattatataatgatggggtatcaatccaatgagaagagcgaactatcctaaatatatatgcacccaatacaggagcacccagattcataaagcaaacccttagagacctacagagaaacttagactcccacacattaataatgggagactttaacaccccactgttaacattagacagatcaacgagacagaaaattaacaaggatatcaaggaattgaacgcagctctgcaccaagcggacctaatagacatctacagaactccaccccaaatcaacagaatatacattcttctcagcaccacatcacacttattccaaaattgaccacataggtgaaagtaaagcactcctcagcaaatgtaaaaacacagaaattattacaaactgtctctcagaccacagtgcaatcaaactagaacgcaggcttaagaaactcactcaaaaccgctcaactacgtggaaactgaacaacctgctcctgaatgactactgggtagataacgaaatgaaggcagaaataaagatgttctttgaaaccaatgagaacaaagacacaacatacaagaatctctgggacacatttaaagcagtgtgtagagtgaaatttatagcactaaatgcccacaagagaaagcaggaaagatctaaaattgataccctaacatcacaattaaaagaactggagaaacaagagcaaacacattcaaaagctagcagaaggcaagaaataactaagatcagagcagaactgaaggagatagagacaaaagaaacccttcaaaaaaatcaatgaatccaggagctggttttttgaaaagatcagcaaaatcgatagactgctaccaagactaataaagaagaaaagagagaagaatcaaatagatgcaataaaaattgataaaggggatatcaccaccgatcccacagaaatacaaactaccatcagagaatactataaacacctctatgcaaataaactagaaaatctagaagaaatggataaactcctggacacatacaccctcccaagactaaaccaggaagaagctgaatccctgaatagacgaataacaggctctgaaattgaggcaataattaatagcctaccaaccaaaaaaagtccaggaccagacagattcacagccaaattctaccagaggtacaaagaggagcaggtaccattccttctgaaactattccaatcatcagaaaaagagggaatcctccctaactcgttataaggccagcatcatcctgataccaaagcctggcagagacacaacaaaaaaagagaatttttgaccaatacccctgatgaacattgatgcaaaaatcctcaataaaatactggcaaaccaaatccagcagcacatcaaaaagcttatccaccatgatcaagtgggcttcatccctgggatgcaagcctggttcaacgtatgcaaatcaataaacgtaatccatcatctaaacagaaccaaagacaaaaaccacatgattatctcaatagatgcagaaaaggccttcgaaaaaattcaacagccctttatcctaaaaactctcaatgaactaagtattgatgggacgtatctcaaaataatgagagctatttatgagaaatccacagccaatatcatagtgaatgggcaaaactggaagcattccctttgaaaactggcacaagacagggatgccctctctcgccactcctattcaacatagtgttggaagttctggacagggcaatcaggcaggagaaagaaataaagtgtattcaattaggaaaagaggaagtcaaattgtccctgtttgcagatgacatgattgtatatttagaaaccccatcgtctcagcccaaaatctccttaagctgataagcaacttcagcaaaatctcaggatacaaaatcaatgtacaaaaatcacaagcattcttatacaccaataacagacaaacagagagccaaatcatgagtgaattctcattcataattgcttcaaagggaataaaatacctaggaatccaacttacaagggatgtgaaggacctcttcaaggagaactacaaaccactgctcaatgaaataagaggacacaaacaaatggaagaacattccatgttcatagatagtaagaatcaatatcgtgaaaatggccatactgcccaaggtaatttatagattcaatgccatccccatcaagctatcaatgactttcttcacagaatggaaaaaactactttaaagttcatatggaaccaaaaaagagcccacattgccaagacaatcctaagcaaaaagaacaaagctggaggcatcacgctacctgactgcaaactacactgcaaggatacagtaaccaaaacagcatggtactggtaccaaaacagagatatagaccagtggaacagaacagaaccctcagaaataataccacatatctacaaccatctgatctttgacaaacctcacaaaaacaagaaacggcggaaggattccctatttaataaatggtgctgggaaaactggctagccatatgtagaaagctgaaactggattccttccttacgccttatacaaaaattaattcaagatggattaaagacttaaatgttagacctaaaaccataaaaaccctagaagaaaagctaggaaataccattcaggccacaggcatgggcaaagacttcatgactaaaacaaaagcaatggcaacaaaagccaaaattgacaaatgggatctaattaaaataaagagcttctgcacagcaaaagaaactaccatcagagtgaacaggcaacctacagaatgggggaaaatttttacaatctacccatctgacaaagggctaatatccagaatttacaaagagcttaaatttacaagaaaaaaacaaccccatcaaaaaatgagtgaaggatatgaacagacacttctcaaaagaagacatttatgcagccaacatacacatgaaaaaaggctcatcatcactggccatcagagaaatgcaaatcaaaaccacaacaagataccatctcacaccagttagaatggcaatcattaaaaagtcaggacacaacaggtgctggagaggatgtggagaaataggaactcttttacagtgttggtgggagtgtaaagtagttcaaccactgtggaagacagtgtggcaattcctcaagtatctagaactagaaataccatttgacccagccatcccattactgggtatatacccaaaggattataaatcatgctgctataaagacacatgcacacatatgtttattgcagcactattcacaatagcaaagactcggaaccaacccaaacgtccaacaatgatagactggattaagtaaatgttgcacatatacaccatggaatactatgcagccataaaaaaggatgagttcatatcctttttagggacatggatgaagctggagaccatcattctgagcaaactatcacaaggacagaaaaccaaacaccgcatgttctcactcacaggtgggcattgaacaatgagaacacttagacacagggtggggaacatcacacaccagggcctgttgtggggtggagagagagcattaagcgatatacctaatgtaaaggatgagttaacgggtgcagcacaccaacatggcacatgtatacatatgtaacaaacctgcacgttgtggcacatgtaccctagaacttaaagcataataaaaaagaaaagaaaaaaaacccaccacaaaaaaaataaaaaaaaataaaccaacaaacaaacacaacctaaattccctgaatgggcttaacagtggaatgaacattgcagaagtactgatgcctcaagatggatcaatagaaatgatgtaaactgaacaaatgaaaaaaattttcagtaaacagacgtttagtaacatgagataatagcaagtcttctaacatacgtaaaattggatttccagaaggagaggagaaaaaagatgaggcagaaaaaaaaaaaaaaaaagcctttgaagaaacagtggctgagaatttcccaaatctggtacaaaacatgaacataaagattcaagaagctcagcaaaacccaggttaggtaaattcaaagaaaatcacacatgtaatacacttctaaaaaccaaagccaggaaaattttaaagaagccagaggaaaaagatttattatatacaccagaacaatgataagaatgatagccaacctctgaatagaaacaaaggacattgtaaaacaattgaacatcatctttaaaatgctgcaggggaaaaatacctgtcagcctcaaattctataccaagtaaaaggaaaaaaaaattcttcggtgattttccacacattcagtatatatgtatatattcagagcaatgccttaaaaaaagcatgcagaggcatacttaaaaagtatataagaaaataaaaaggactgttttttaaatacttgattataaggcagaaaaggatgagtaattgaacaaatagataacaaatatcaagatgacagatttaaaaactatcgatcaataattataattaaatacaggggtggctggcaagatggccaaataggaacagctccaatctgcagctcccagtgagaccaacacagaaggcaggtgatttctgcgtttgtaactgaggcactcggctcatctcactaggactggttagacagtgggtgcaacccacagagggtgagccgaggcagggtgaagcgtcgcctcacctgggaagctcaaggggtcagggaactccctcccctagccaagggaagctgtgagggactgtgctacgaggaactgtgcattattgcccaaataccacccctttcccagggtcttcacaaccaggagaccaggagattcccttgaatgcctacaccaccagggccctgggtttcaagcacaaaactgggtggccgtttgggaagacaccaagctagctgcaggagtttttcatcatactggaatgccagtgagagagaaccattcactcccctggaaagggggctaaagccagggagccaagtgatctagctcagcagatctcacccccacaaagcccagcaagctaagatccacttgcttgaaattctcactgccagcacagcagtctgaagtcgacctgggacgctcgagcttcttgtgggaaggggtgtccaccattactgaggcttgagtaggcagttttcccctcacagccaggaagttggaactgggcagagcccaccacatctcggcaaagccagactgcctctctagattactcctctctgggcagggcatctctgaaagaaaggcagcagccccagtcaggggcttatagataaaactcccatcaccctgggacagagcacctgggggaaggggtggctgcgggcacagcttcagcagacttcaatgtccctgcctgccagctctgaagagagcagcggatttcccagcacagtgcttgagctctgctaagggacagactgcctcctccagtgggtccctaacccccgcgcctcctgactgggagacacctcccagcaggggtcgagagacacctcacacaggagagctctggagagtgcccctctgggacaaagcttccagaggaaggaacaggaagcaatctttgctgttctgcagcttctgctggtgatacccaagcaaacaaggtctggagaggacctccagcaaactccagcagagttgaagcagaggggcctgactgttagaaggaaaactaacaaacagaaaggaatagcatcaacatcaacaaaaaggatatccacacaaaaaccccatccaaaggtcaccaacatcaaagacaaaaggtagataaatccataaagatgaggaaagccctgcgcaaaaaggctgaaaattccaaaaaccagaatgcctcttctcctccaaaggatcacaactcctcgccagcaagggaacaaaactggacagagaatgagtttgacgaattgacggaagtaggcttcagaaggtgggtaataacaaactcctctgagctaaaggagcatgttctaacacaatgcaaggaagctaagaatcttcaaaaaaggttagatgagttgctaactagaataaccagttcagagaagaacataaatgacctgatggagctgaaaaacacagcatgagaacttcgtgaaacatacacaactatcaatagccaaatcaatgaagtggaagaaaggatatcagagattgaagatcaacataatgaaataaagtgtgaagacaagatcagagaaaaaagaatgaaaaggaacaaacttggcctccaagaaatatggaactatgtgaaaagaccaaacctacgtttgattggtgtacctgaaagtgacagagagaatggaaccaagttggaaaacactcttcaggatattacccaggagaacttccccaacctaccaaggcaggcaaacattcaaatttaggaaatacagagaacaccacaaagatactcctcaagaagaacaacaccaagacacataatcgccagattcaccaagtttgaaatgaagaaaaaaatgttaagggcagccagagagaaaggtcgggttacttataaagggaagctcatcagactaagagcagatctctctgcagaaaccctacaagccagaagagagtaggggcccaatattcaacattcttaaagaattttcaacccagaatttcatatccagccaaactaagcttcataagtgaaggagaaataaaatcctttacagacaagcaaatgctgagagattttgtcaccaccaggcctgccttacaagagctcctgaaggaaggactaaatatgtaaaggaaaaacagataccaaccactgccgaaacatgccaattgtaaagaccattgacactatgaagaaactgcatcaactaacaggcaaaataaccaactagcatcataatgacaggatcaaattcacacataacaatattgacctttactgtaaacgggataaatgccccaattaagagacacagactggcaaatcggatagagtcaagacccataggtgtgctgtattcaggagacacatctcatatgcagagacacacataggctcaaaataaagggatggaggaacatttaccaagcaaatggaaagcaaaaaaaaaaaaaaaagcaggggttgcaatactagtctctgataaaacatactttaaaccaacaaagatcaaaaaagacaaagaagggcattacataatcgtaaagggatcaatgcaacaagaagagctaactatcctaaatatatatgcacccaatacaggagcacccagatgcataaagcaagcccttagagacctataaagagacttagacacccacacaataatagtgggagactttaacaccctgctgtcaatattagacagatcgacaagacagaaaattaacaaggatattcaggacttgaactcagctctggaccaagcggacctaatagacatctatagaactctccaccttaaatcaataaaatatacattcttctcagcatcacattgcacttattctaaaattgaccacatatgggaagtaaaacactcctcagcaaatgcaaaagaatgcaaatcataacaaacagtctctcagaccacagtgcaatcaaattagaactcaggattaagaaactcactcaaaactgcacaactacatggaaactgaacaacctgctcctgaatgactactgggtaaataacgaaattaagggagaaataaataagttctttgaaaccaatgagaacaaagacacaatgtaccagatctctaggatacagctaaagcagtgtttaaagagaaatttacagcactaaatgcccacaggagaaagcgggaaacatctaaaatcaacattttaacatcgcaattaaaagaactagagaagcaagagcaaacacattcaaaagctagcagaaagcaagaaataactaagatcagagcagaaatgaaggagatagacaaatgaaaaacccttcaaaaaatcaatccaggagctggttttttgaaaagattaacaaaatacatagaccgctatccagactaataaagaataaaagagagaagaatcaaatagacacaataaaaaaatgataaaggggatatcaccactgatttcacagaaatagaaactaccatcatataatagtataaacacctttatgcaaataaactagaaagtctagaagaaatggataaattcctggacacatacaccctcccaagactaaaccagaaataagtcaaatctctgtatagaccaataacaagttctgaaattgaggcagtaattaatagcctaccaaccaaaaaaagccaaggaccagacagattcacagctgaattctatcagcagtacaaagaggagctggtaccattacttctgaaactattccaaacaacagaaaaagagggactcctacctaacttattttatgaggccagcatcatcctgataccaaagcctggcagagacacaagaaaagaaaatttcaagccaatatccctgatgaacatcaatgtgaaaattcgcaataaaataccagcaaaccaaatccagcagcacatgaaaaagttcaacatcaagtcaacttcatccctgggatgcaaggctggttcaacatatgcaaatcgataaacataatccatcatataaacagaaacaatgacaaaaaccacacaattatctcaatagttgcagaaaaggccttcgataaaattcaacagcacttcatgctaaaaactctcaataaactaggtactgatggcacgtatctcaaaataataagagctatttatgacaaatccatagccaatatcatactgaatgggcaaaagctggaagcattccctttgaaaactggcataagacaaggatgccctctctcaccactcctattcaacatagtattggaagttctggccagggcaatcaggcaagagaaagaaatacagggtattcaagtaggaagagaggaagtcaaattgtctctgtttgcagatgatattattgtatgtttagaaaaccccatcatcttagcccaaaatctccttaagctgataagcaacttcagcaaagtctcaggatacaaaatcaacgtgcaaaaataacaagcattacgatacagcagtagtacaaacagagccaaatcatgagtgaattcccattcacattgctacaaagagaataaaatacctagcaatacaacttacaagggatgtgaaggacctcttcaaggagacctacaaaccaccactcaaggaaataagagatgacacaaacaaatggaaaaacattccatgctcatggacaggaagaatcaatattatgaaaatggccatactgcccaaagtaatttactgattcaatgctatccccatcaagctaccattgacgttcttcacagaattagaaaaaacttctttaaagttcatatggaacaaaaaaagagcctgcatagccaagataatctaaagcaaaaagaacaaagctggaggcatcatggacctgacttcaaactatactacaagggtacagtaacccaaacagcatggtactggtaccaaaacagatatatagaccagtggaacagaacagaggactcagaaataatgccacccatctacaaccacctgatcttcgacaaacctgacaaaaacaagaaatggggaaaggattccttatttaataaatggtgctgggaaaactggctagccatatgcagaaaactgaaactgtaccccttccttacatcttatacaaaaattaactcaagatggattaaagatttaaacagaagacctaaaaccataaaaaccctagaagaaaacctaggcaataccattcaggacacaggcatgggcaaagactttatgactaaaacaccaacagcaatggcaacaaaagccaacattgacaaatgggatctaattaaactaaagagcttctgcacagcaaaagaaactatcatcagagtgaacaggcgacctacagaatgggagaaaatttttgcaatctatccactagacaaagggctaatatccagaatctacaaggaacttaaatttacaacaaaaaacaaacaaccccatcaaaaagtgggcaaaggatatgaacagacaattctctaagaagacatttatgcagccaatagacatatgaaagaaaggtcatcatcactggtattagagaaatgcaaatcaaaaccacaatgagataccatctcccaccagttagaatggcgatcattaaaaagtcaggaaacaatagatgctggagaggatgtggagaaataggaattcttttacagtgttggtgggagtgtaaattagttcaaccactgtggaagacagtgtggtgattcctcaaggctctagaaccagaaataccatttgacccagcaatcccattactggattatatacccgaaggattataaattattctactataaagacacatgcacatgtatgtttattgaggcactattcacaataacaaatacttgaaaccaacccaaatgcccataaatgacagactggagaaagaaaatgtggcagttatataccatggaatagtatgcagctataaaaaaggatgagttcatgtcctttgcagggacatcaatgaagctggaagccatcattctcaacaaactaacacaggaatagaaaaccaaacactgcatgttctcactcataagtggaagttgaacaatgagaacacatggacacagggaggggaacatcacacactggggcctgtcggagggtggggggctaggggagggatagcattaggagaaatacctaatgtagatgacgggttgatgggtacagcaaatcaccatggcacgtgtctacttatgtaacaaacctgcactttctgcacacgtatcccagaacttaaaatataattaaaaaaaataattaaatacaagtgaatactaagtataaggagtggactgctggactggaagattcaaatatatgacgtctgcacaagccattttaaatataaagccacagatacattgaaagtaaaatatgaaaaaagttataccatgcaaatggtaagcataacaacactgatgtggctacattaacctcagccaaaacagacttcaggatatgagggacatttcataatgggaaaaggtcattatcaggaagacataaagtcctaaatgtatacccacaacacttgaaaatacatgaagcaaaactcaacagaaccaaaggagaaataggcaagggcacaatgatagatgaaattattaacactattttctaagtaattcataggaaaaatgggggaagacaataagcatgcagaagatcttaacaacactatcaaccaactagactatattgacattaatacagcactacatccaatgcagaatacacaaggtatacaagtacccatggacggttaacatagatagactatatacatacatacattttcatgtgtgtgtatacatatatatcactgagcaagagaagcaaatttcaaaacaacgttggaaagacatttttagctatttttcctaaaaatggcaataaaaattacatcacctaagatcttttatccatctaatgtaaaaaaggtcattccacaatctataaatctaaagatattttctggaaactatgactcacattatacacaatgtcccacagaaataatcaacataatgcacttattatagcaatgtattaataagccaaattaatcaactaccaaattgtgctatatttcagcttgagtagagacaaagctcataaaagtacttcagaatactattagtttgtgatactatttctcattaaaatatatttttgagacaaacttgaaatgtagcaaaaaatactacatattcaaaataaatattcaaagggaaatatataaccatgatgtcttctacataaaattttttgaaataaattatgttcaatatgactcatgttttctgagaatacaatccaagattactatttactatgtacaaatacagcacaattatgtgcaaatattgcacaatatactgtacatttatttttgcaaataccccatttaaaaaattataatacttggaatgccatgaggcctgaaggcccatcatcgtccaagaagctatcagcagtatggccatagctgtgttttccgtggtcactgactgaaacataaactcctcttgtcttctatacctgtaatcactacagcaatatgctgtgctgcttcttcacccaatcccaaattcctcctgtccttcataacccttgttagttctctgtaattcctactcaatgatataaaaactcccaaacaacatccatcctcccaagtcactgaaagggatctggccctaaatttcctatcttatgcaaattctgattctcccccaagccacatcttctctgaaacagaggctgcattttctaccatacttcaagtacttcggtggtcagacaaataaattaatattctcttcattcccccatacgtcttctgaattgtatttctgttttcctgagaaaacccatcctcctttgacatttgtatcatttggctctattaaaaatagttatgtaaccacctctgatcactcctgactcaatattcctctccatgccagtcccaaggtatatttttaactacatagaagagccattgaacatccacccccaaagacctttgattctctcatcttctacgtctttctccattacacttgccacgtatttctatggccatatcctcatcacacaaactactccacctctgaaatcgctaatttcctatctccagtcccaacttttctcctgaaaaccggataaatttctccaactaatcttcaatatcttcatctggatattttgtgcatacctgaaactcaacaacttaaattggtcacccctcccacgaggagttttcagtaggcttaagtagattccagctgagaagctgtaagaatcgtgttctagggttgggacgctaggccccagtggcctagattttctagtgggatcttctgatccatgggttgcacagttctgtggaaaaagcacagtttccccttctgggtagcgtgctcattcactgcctccctttgctgggggtagggggttctcctttcccatgtagctctcaggtgggccacgcactacactgctcttccttctgtccatgggtcacgccagccttctagtcaagtttgatgagagaacctggataccttggttgccagtgaaggattcacatgcttattatgtttttttccgataggagcctctgagcccccctgcttctagtcagccatcttggccccgtcactcctattatttttacctcatttccttttcttaatgaattggattgaaacaccagaatacagttatttaatatagaaccttacatgtttctgattgtaacaggtatgcctagagtatttccccattatagtgtttattatccgcattttattaggaatttttaaaaagaaattatacctttgctatatctttcaagataatattcttttatctacttactgatgtgatgaatgatattagtacatgttattactgatccataatttccttcctaaatcttactcagtgtattattattttactatatggtatcagtcaaatttctccatatttcctcttttagtttatgttttttctgccttgcctgtgaaagtactgcccatcccaagattttaaaaagctaaaaacttccacaaatggcataataaacactgtaacaaaaaatatattgtcagactaggaaaatatataacatatataatagacaaaggatcaaaatctctcatataccacttagataataaaaaccaaactaaaaaaggaaaaagattataaacaggaaattcacagaataatacacacgctatataaatagaaaaaccaattggttttccttctcattcacactcaacacagaatacttcacctctggttaccaaaatggggaagggttcccacttcccacactgacaagtttaacaccagctgggtatcctacaatttaatccgattctgataatatatccctggagttagcatcaaatcccatgggttaagggctcaatccctcaagattgcctccacttcagatatcaatcaaaagcctagattgtgaccagagcttctgtctgaccagctatatattgccagggtggggagtggtgggaacatgaccctctcctcaggtttgattaatttgctagagcaactcacataactcgaggaaacacatttacaagtttattaataaagaatataataaaagacacagatgaagagctacacaaggcaaagtatttgggaaggggtgtgaagcttccatgccctcttgggggcacaccacccccccaacaccacatttcccataccctagaagctctctgaaccctgcagcttggggatttttataaaggcttcatcacatagttattgagattattaactcaatctctagccccttcccccttcctagaagaaaggagttagaactgaaagttccgggcttctaatcatggcttagtctttctggcagccagcacctaaccaggagcccaccaagagtcatcttattagaacaaagagagtcctatcacctaagaagttccaaggaattagcagctgtttgtcagaagccaggataaaagctcagttattagaacaagagatacatgtagaacccccatcactcaagaaattaaaaaggttttaggagctgtgtgccaaaaactaggggtagagacctatatctatctcttattatttctcacacatgctcatatacaagcatgtatattattaatttgaaggaaaaataagatgataacccacatacagtgttagtcattcactctcacacaccgttggaggaacaggtataacatttactctcacacactgttggaggaactataaattcatattatcttttgggaggttacttttgcatctttaacgaaacatttcactctaagccttcaaacattttaaattcacctctgaagaacttctcctacagattactgatgttcccatagaatgtacctcttcactacagcactgttaactaacgcaacattggaaccaacctaaatatctacaaatgaagaatggcttaataaattaacactgtaataccatgcagctatttgaaaaagagagatttaaatgtaatggcttagaaagagttccatgatgaagtgaaaaaaaactgaataaaacttttgacatgtaaatatataaatataaataagatataaaaggatttgcaccacgctgttaaaagtggttatcactggagatgagcctggaggagcttagggttaaattttctttttttctttttttttaaattttattattattatactttcaactttacatatatatctttttttagtaagaatatgaatgatttttaaattttctctattttctgttttagtttttttaattcttttaaattaaataatttggtgtctttaatttgctaaagatttacataatatttctatacgtctagtcttaagtgagaccagtctctagggttttgtgggggggtgtgtgtgtatctttgccctgtttgaataacaaagttacaccttgaaaaaacgaattgatagttttctgttttctgttccatcaaagtctgaacaaaataggaatcattttattttcacaagacctcttagaacctaattgtagttatctgcatgttgcatcttttgcaagggtagttcttgaacaacttttctacttcttccataggctgttagtctgatatccagactcccttctataaataagttcagctttcatatctgtatgaacttatttttcagagaagttttacttactctactgttcatgtcttcaatttcctttgctcgctgaattctcctcatttctaagacctgctctcttttcttttgcaaccacgctttaaatactatgtcattctctctctttttttctttctcttcttctatttttcgtcgctcttcctagtaaaagaatatgaaaagacattaatggaagattaataaaattgtatgagttatcagagtagagagatatattttgagatctgaaattaggattccctgaccctaaaactttccatcagaaaactggtccttctaggccagacacggtggctcatgcctgtaatcccagcactctggggggccgaggcaggcagatcacttgaggtcaggagttcgagaccagactggccaacatggtgaaaacccatctctacccaaaatacaaaaattagctgggctaatttaacaagttcatagtaaaattttcttcaaataatggaattctaagtgttttccttacattttgacaatatagcaagactttctaattccttttgattgaacagaaggaagggaggaaaggaaaattctaccaaacagcataaaatatatttgagaatacctatatactattttctgagccctaaagtagcctgtattataggaaatataaatgaatttattaagaattaaattttacattatttatacatttccatttcacacaaaggactttggatgccttgcatgaatacagtatgacaaacgatgattatctttccaaggggaacattcaggtatattacacagaagctatcagccaaagcactgataacggagttgccaaagagaacactgaaatgatgcacttaggttagaaagacagagtatagcagcccaacccagaaaatatgggcataaaaaagcaaagccttcccctgaaaccaactaaaacatgttaaaagccttagtacttgaagaccatgccttgagccaagttagttataggatacaataaaagtgtatttcagaacaaagagtgtgtgacattcagaaaagagaatccaaatgaaaacagaattatccatccttcacaccagttaaagactaacatcagttcattaataaaaaggcagtgacaactatataaaatcacctgtataacttttgtaaaaatatacacatacctacacatttgtgtatagcaaacatatagatgtcattctcaaaaaattattttgtattgtcaccaaattcctatactttcaagtgtttttatacctgaatcaagtaaacttagtttgactattagagctattagtgaccaagtgaacgaagctctataagcttgcacccttttaggttcttatctgagtgtgctagaggttacacgttcttacgaagtcatgtttcactttttttttttttttttgctaatgccaattcctgatttaaatgccagatatttccctgataatttcccatataaagtagataacacaccatttctcaagggtgccagagaactggaaatttttattccagtttgctactaacaagtacagatataccttggtaaagttatttaaactttctaaggttttcttatctgcaaaatgatctgtaaggtcacttctcatgtattatctgctgagctttgtatttagaattagacattttgtatggctcagcttaataccattaggtttccagtaaaacaaagaattggagcactgacataagtaattctgagaaaactcaccagtttaagtcctggaattttcaattataagatacatagagtttcacataagaacaaatatgaaaaacaaaaaaaattaatttgggattctatatggcattttggagacatttcgttaagaatattaggctatattcttaatctgaaactaaactcctggaaataaaagaattgtaagcatagaacataacatgaaacacatgcaaataaaagaattatagtccaagtcttcctgttgcctcctaaacctctacactttatgccttcatttttccatctgacattttatttttacctatcatatcaagattactttcagcagtcacttaacgtctcatgagtctcacctttaaaatgaaaggatcagatgaagtcatcactgagatctccgctaacacagatcagtctactattctttgtgatccttacaaggaccaaagtaatcactgtgttcattccataaatgcacattcttaacacttaatcaatctaacaatagataaataaagcaatcaaaaaaagtctccaatggtttgaacaactgttttaattcccattgcatttataaaacagtaaaacatactctacttttaatataatgcccacttaggttctcacctctcttttcagtttttctctcttttcttctagttgtttttgtagttctttctgtcgaggggaaagacagtatgttgaagtcactggtgagatatgtgcagactgtgtcctgtgattagatttcccattccctttacttcgatctgagttgacagcagagcttggacaagtcttgcggttgagtggtggctgagcgatataagccagcggctctcctgttgatgagtgagtgacagcatgaatctttgctgtagaatcttctttcttggtgccactgacagaggagttggaagatctgggtaacaactgctgagggtcattttctgtactatttgcattattaatgggaggcaaaaacccctgactggcaatgtcttgtaaattcagaagttcaaattttccatctctctctaccagtattgtcctatccttgttttcttcacagcttccattagtaagtgacaggagcacatcttcttgtccaaaatcattggaaatacataattgtgacagtttcccaaacatattcctttcgttttcaaaataatttttaaaagtagtagtgtcttctagtggaggaacttccaaatcaactaactggtccttgaacttaagttttcgctcccttttatcattcaccggttcttgattctgtagaagcttgttagcttgtacaattttctccataatatatctccttacttcctcatcctcttcctcctccaagtctttctggctttctagtttggattcctggaaagagttttcactatctgaatctgatatgggatccaaaggttgaatacctggtacagaaatgatgtcatttcttcttggtgagacctcatcctgcaaagatttgtcaggatcagaatgccgtttggtgtgctccattactgtctcattctcttttaagtcttggttaatattctcttccttctcacaagccatctaaaaacaagatatttttcagtcaaaattgagattcttcatttataagtagacatacaaaatgggatttttcctgttcatgtaatttattttatgaatgggaaaatttaagtgtttattgctcataatttgctcataacattctaattcatacttatgagtatccaagggaaataatgtgacagcaatgcaggaaaaattcaactttaaatttgaatttgatgtagctaagtgctacattgatttttaaacatttttatgctaatgtatcaaaaggtaactacaaataacaatattaatattccttcccctataaaattttcctctctttacattttcagaaaaacaattttcaaaaatctttcctccttgtaatatttgcattcttcaatcaaacagctttctccccagaccatttcaaggatgaattatttggtcaggtcctaatcacttgaggttcttttaatcttttcagactattattatcactataatctgcaggacctatctaaattccaggtcaatttttacctctagatcagatttcccttcttcaactatactcagagatttcagaaatccatgctaaccaccatcagataacttggccttaaattaaaaaaagttaattccacatgaaccataaaccagtatcagtgcagcacaaaactccacttctgctgtatctaactaaaagcttatatatataaaaatataatagatataatatataaatgtatataaatattttatatatatatatattttttctctttgtcaaagttctctccctcctaaagcagttctatgggagctactacatgcttctctcttcaaccccttaaaatcactttcctccttcatttgctcataggtcatcctgtgtgatagtgaaggtcatcttgtctgatagtcagatgtctaataagcaaataaacctggcccatttaaatgactgccaaataactatgatttaactaagagctctgtatcacaagtgttcattttagccttatttgtttctctagttgactcttttttatttttccaatatcatgaggatggcagatctctggttcattcttatagtctctgtttctgaactctcctttagcttttcttttcttttcttttgaaaacccactttttacaaaaaaatcttcccctgaccctcttatgtgtctctagctcagtcatccccttttcccaaaagcctcaaaagaagaggttgttataatcatccgctggaatgtgtaagattcataacagcacttttattttattcctgctatatatatccctagcacctagaacagcctctgatatgataggtgatcattaatacttgttgaattagaaaataaaacaataaatcatccctattacctctctaattctatcgcactgtgctttggatctcacacccttccagtcttgagaaattggttcaaccttaccactctgggtatctgcctctactcattctgcttatttttctgttaggatgcataaaactcccatttaaaagccatcttagaaaaatcttcacttttgactctgtttccatcttcaaacattgtgtattccatttgtcttttccattatataagaaagcaaaatggaactaagaaatctgtaatataaaacctgcatttcctcatagtcttttccttaacacctttaaaactggcttctgctataactctgatcattatccctccaaagtcacctatttatatcctagtgttattcctttttctacttattgacactaacttatgtatatacatatatatacacacatacatatgcatatatacatatatatgttttacagaaatacatatacacattatacacatgtaaagagagagagaaataacctaccttgatgcaggaactggttaattttcctggagttcctttcttcatctctgataaatagtatatgaccatgcttaatgcatccacttttcctaggagtattcctgtgactcagactttgaccctttactttgttctctatattcattgccaagaagagctaattcagtcttaaagttttaaatattagctaaaaggtcatgtgtttagaggatttgctttatttttcatttattttaatagcataaccccatgattttacccaagttcacagaaagtaggaattaactgtattttttactttcgatgcaataaatcatgattttactatttatttatattatttaaattataattttataatggtcactttagtttattaaatgctagcgtaataactgttctctcactaacctgccctatgccttaggatacaacatttaagcaatctacgcctcatttttcttatctttaagatgaggataatagtaatttgcccaatgtagatcaaagaaattttgtgatgtttagatgagataataatgtgaaaaccttaaagaattgcaaagcactttgtaatataattattatgaatgctgttggcaatatatacctctattatgctggcatcacttttttcattttcattaattaaccactccaggtccttttcaaagtcatcttcgtattcttcacttttctttgaatcagtatctttattttcattcattttctgtttgtgaaggaaatatgctgtaagattttaaaagataaggtatatgttatgcccactctagaggaggaatggagtatggagattaatgctgtaggtaagctaattaacacagagaaacacaaaatagaatgttcaaaatgaacatgcacttgaatacaccatgaaagagagatctgcaatggcaagacatttccataggtaaacattcctaaaaactctcccaccttccccctgttccccaaatagttattgatgttggttccttttccctctcaagataaagttaatttttggtacactttaggtatgctgaattaataaataatccaccagctgttttagccattagcttcgctttgttctccccaaacctttggccagactaagttattactgaataataactgttattcaacttaattattattcaaaaataactgttaattgttcaactggataattattgtttttttctaaactattcattggactataattctttctagatacttatttattttaaactaaaaacacaaaatagatttgctaaaggactcaaaagtaagcccttcaataatttctaaatcaggttgagcacaaattttgaagtgatctggagaaatcaagtcaacacttcagagtgagtttcacttcctaactgcaagacaagctaaattgcttaagctattatatctaactacctaccaattaaaagcaagggcaccatgaatgatacagaataaaactcactgtaatccgaaatacttacagtaaaaatagtacttttcacagtcacaatgccttggaataatcagttttcttttcagagcagggatcttgaaatttattattttaagatgtttgagttacataaatattataagaatatttctttggaactcttcagtgctttcccttattttatgataaacatagttctgaacttataaataaatggttgcctgaagactttagtagatatgttttattgtttacagagaatcacacacacatgaaaactaaaatttaaaatgaaaacataaaatctgtataataaaagcacagtaattaaaaatttaacaggttaggggtctttaagtcatactattatgccataattcaaaggaaaaaaaagccatagttaaggtaactctgagaagtaaattaagtcacatcaaatctgaagtgcaattcttttgttgtaacttaaaaacaaaaaaacaccctcatggccggttctcaagtaaacaaagaacataaattacaaactctggttatcaaatcccttaagcctttttcaaatgcgtcacaggatattcaaccccttcaattcttttaatcttcatcaccagggtactgtccatatggtacagaatcaacaagctagaacaaaaatacatcttatacaaacaaaatcacttaacacttcctactttatgcttgtgagtttcacacatttaaatttcaacatttatcatcagtaaaaatctaggtaaacggcttagaccagctctaccctcttaatacggaactgtagtaagagacggaaataaattccttcctccctgagtgtctggtaaatcccatgtggataggtgaactgccgatctttcagtaggagtcttaaaccaagtccacatgtatacataattttgataactttcttccagaattcaggatattcaaaaatagtttaaataattgggtcccatcttacagcgttttaaacatatgcttgcttaaaaatctaagaactgaaagcatgtcaaagagaatgccttttaatataaagtaagtacttaagcaaaaactaatccatacatcatgaaaccatctggcccattattcctgtgtatcctgccaagactgtgatcctataagtaagtttttaaaaaatcataaactgtcacaaagtatgatgataaatattttatggactttaggtgataattttaatctgtattcaggatcccaaggtaccaccaacgaaatgaataccattgcctcctcatggaagctacaatttcgggagtgactttttctcccagggacaaaattattactttccacgttcaagaactttgagaggggaaagaatatgacaaaaatttagtctaagctactctcagacgagtatccttcatacatagtgaagaaaggtgttaccagacttccccaccagtgccagactcggtggacctcggactccagaggataaggcgccaccagaaagcttcttccctcactacctaccctccctcccagctataccagacgtttatacctttaccctctatcccaccattaacatctccgcatcgtccttcccttctctccctctatatccctcttgcctgtgtaaaatgcggcggctgggatcacagagatggccgggggagttctcctctcctcctctttctaagctcttcacattgaggcaaaggagaccccggcacctgcctccgcggcagccaggaccacactgccatggcaacagcgtgcctctgcgtcctccatccgggcctctctaactacgagagcgacaaaaatctgcgcaggcgcatgcaatatcctcagaccaccgacccctcccggcacccatcccggtgcttgcgaagggccagtgaagctgaggtttctaaggggacgactaaggaatccacgcatcactaacgttatagagactcgcgaagtgccgctgtgttggttgtgaaatttccctcttgtagctgtctctcgtcagatttagaatttcttaggacaacttctaaaactatatttctatatgttatgtgcttcacagttaacgtagaaaagtagtttttagttttcattagtagataagcaaattgctaatgagttaccatatttttgaccctcagcttctttttttcctaatcaaaaccaaaactttacccaagagagttgccaaagaaaataggatttttgctctagctttgaggcatgtcaaaatggtcaactagaattttctcaaattctgcttatctttatgtataaaggcaaagcaagatgaatttagattgtggtgaaagttgagatgattttaacaactatccattcccagccagaaataaataagaactgggagaagtaaaaatatttcctcagtacaatccagtgtgttcggattatttttaaattgtttattattaggatttctatcacttgatgtgatggagagcaccttttctccaagagaggcaatgtaaaattaaatttttagatattcttcaagttatagacttaaggtcttttaaaatggaaggttaaaatgaattgtaatattgagtgcacttcctagatgtggtgtagttgtaatgacctaatgttgctactgcttcagcgcttgaaaaaagacgctcccaaaaaaggttattcactgctaaaggttgaaggaattttagtcaaatctcctttaatggatgtagagttgtagagttacttaccaaagctggaagtagaccctaggtttcagaactcctaggttaatagttttttcctctgaccatcctcctaaatttgtatttttcaaataatgggtgatagcagctttttttttaagtatcaggttttgggggaacaggtggtgtttggttacatggataagttctttagcggtgatttctgagattttggtgcacccatcacctgagcagtgtacactgtacccaatatgtagagtttttttgtttgtttctttgtttgtttgttttgtttttgagacagagtctcgctctgtcacccaggctggagtgaagtggcacgatctgggctcacttcaacctccatctcccgggttcaagcgattcttgtgccttagcccccagagtagctgaaactacaggcacgccaccacacctggctaagtttttgtatttttagtagagatgggttttcaccatgttgcccaagctgttctccaacaactgagctcaggcagtctgcccacctgggcctcttaaccaatatgtagtttttttatgcctcatcctgctcccaccctttctcccaagtccccaaagtccactgtatcatctttacgcctttgcatcctcatagcttagctcccacttacaagtgagaacatatgatgtttggttttccattcctgagttacttcacttagaataatgatgaaataacctccatttccatccaggtagctacgatgccacaatttcattccttcatatgactgagtagtattccatggtatgtatatgtaccacattttctttatccactcgttggttgatgggcatttggtttggttctttatttttgtaattgcgaattgtgctgcgataaacatgtgcaagtgtctttttcacataatgacttcttttcctctgggtagatacacggtagtgggattgctgcatcaaatggtagatctacttttagttctttaaagaatctccacactgttttccatagtgattgtactagtttacattcccatcaccagtataaaagtgttccctgttcaccacatccatgccaacatctgttgttttttttattttttgcttatgaccattcttgcaggagtaaggtggtatcgtattgaggttttgatttgcatttccctgatcattagtgatgttgagcattttttcatctctttattggccatttgaatatcttattttgagaattgtctattcatgtccttagcccactttttgatgagcttattcgttttttccttgctgatttgtttgagttccttgaagattgtggatattagtccttagttagatgcatagtttgtgaagattttctcccactctgtgggttgtctgtttactctgctgattatttcttttgctatgcagaagctttttagtttaattaagtcccatctacttacctttgtttttgttgcgtttgcttttagattcttggtcatgaagtctttgccaacgccaatgtctagaagggtttttccaatgctatcttctagaatttttatggtttcaggtcttagatttaagtatttgatccatcttgagttgatttttgtataaggtgagagatgaggatccagtttcatttttctacatgttgcttgccaattatcccagcaccatttgttgaatatggtgtcctttcctcactttatatttgtgtgtgctttgtcagagatcagttagcttcatttcttggttctctattctgtttcattagtctatgtgcctgtttttatgccagtaccatgatgttttagtgactatagccttgtagtatagtttgaagttgggtaatgtaatgcctccagatttgttcttcttgcttagttttcctttggctctgcaggctcctttttggttttatatgaatttgagggttgttttttctagttctgtgaagaatgataatggtattttgatgggaattgcattgagtttgtagactgcttttggcagtatagtcattttcacaatagtgattctacccatctatgagcatgggatttgcttccatttgtttgtgtcatctatgatttctttcatcagtgttttttagttttccttgtagagatctttcacctccttggttaggtatattcctaagtattttattttttgcagctattgtaatggggttgagttcttgatttgattctcatcttggttgatgttggtatacagcagtgctactgttaccggtggagggtgtccatgttcttggtattttgaacaaagaattggaaaaaaaaaaacacacaaataaagcaaggaaagaatgaagcaacaaaagcagagatttttattgaaaatgaaagtacactccacaatgtggcaacaggcatgagcagtggctcaagggctccagatacagaatcttcttgggtccaaatacccactagaggtttcccattggacactttacattggttcaccccatgtaaatgaagtggtggcccgcaatcagtctgattggttgtggaaagcaaccaatcagaggttgaagtgaagttacaaagttacactcctatgcaaacattacactcctatgctctttgcaaccaatcaggggtactttcaatttcccatctgcaggaaagaggatttgccaaggaagtagcctctggtccttttgttacttaaacatggcaagttagggttttcctttcaactgcattctaggaagtcagtgtgaaatggccttaggttcactgactccagaccctattctcctgcctcactactgatttgtgtacattgattttatatcctgaaactttactgaattaatttatcagttctagaatctttttggatggttttctagtatatgattatgtcactgacaaacagcaacagtttgatttcctctttaccaatgtggatgccctttatttctttctcttgcctggttgggatatagcagcatgattggtagccaaaagtggaaatgactcaaatgtccatcaaatgatgaatggataaatgttatatatctatacaatggaatattattctgcaataaaaataaatgaagtactgctggaggattctaaaaagatggtggaataggaagcaccaggaatctatctccccacctggaaaaacaattgcactgtcaaaacctatctcttgtaactattttggaactgtggagtctattaaaggcttgcaactttcaagggaaggcttggacagaaaactgaacttattttggtgaatttcagctcttagttcagtatcatctacccaaccccaaaccccagctccctagcaggcagtctgtattacttgcaggagcagctttaacatagttcatgagagtcaatgagcagtaaggaccctgtcctcctattgatgagggtctatgttctgataattgattactgcttctgatcaaggagatgcaaacacagaggtagccgccattgttgttgcaccttcccccaccattgtaagcttttactcctccagctgaagcaacttccagggaattttccttgttttcttccttttggaagacaaacattaaagactaagacattaaaaagcaactacatttacagagaaaagtataaagttaaattgaacacccagagaaaggcataaactcagaaaaatacctgagaagaccttaaatcataaagatgctcaaataactaaggaaagatgtggagaaagtgaagaaaataatatataaacaaaatggaaatatcaataaattgaaaactaaaaaagaaatcaaagaaattctagagctgaaaagtacaactgaaatgaaaatcttactgttgggattcaaaagcatatttggtcaggcagaagaaagaatcagtgaacttaaagataagacaattgaaattgttgtatctgagaaacaaaaaaattaaaaagttaaaagtgaagagagcctaggggacctgtagaacaccaccaaatggaccacagtctgcattgtgggagtccttgagaaaagagaaagaagtagtatgataatttgaagaaataatggctgaaaacttcccaagtttaataaaggatatgaatatgatcatcacagaagctcaatgtactccaagtagtatgaattcaaacaaacctccactgaagcatattatccatctaactgtcaaaagacaggaaagaagcaactcatcacatgcaagggatttgcaaaaatcctctacaaaatacctgatttcagcagcatattacaaagatactgcaccatggccaaaagtgatttattcctagaatgtaaggatggtttaacatacaaaaatcgatgcagtattctacattaacagaaggaaagagaaaaactgaatgatcattttaattgatgcagaaaaagcattaaattcagcactctttcatgataaaaaacaaacagactaggaatagaaggatactgcctcaacttaataaaaggcatatatgaaaaacccgcaccaaacatcatgctcaattctgaaagacagaaagcttttcatctaagatcaggtataagatgaggatgctggctttcactactgctattaaacatagtactggaagtacaagccagagcaattaggcaagaaaaagaaatataaggcagccagattagaaaggaagaagtgaaattatctctgtttgcaaatgacaggtcttatacgtagaaaaccctaaagatatcatttttaaaactattagaattaatacattcagcaaaaattgcaagagacaaagcacataaagtcagttgtatttctatacactaatgatgaacagtctaaaaggaaattaagaaaacaattcaatttataatataaaaaagaataaaatacttaagaattaactaaatggatgaaagatgcatacaatgtaaaccataaaacagacaaatggaaagctatcccttgttaatggattggaggacaatattattaagatgtcagtattacccaaagtagatatgcagattcaatgtaatacctatcaaaatctcagaaaagcagaaataaatccatcctaaaatttgtatgtaatttcaaggaaccccaaaagccaaaagagtcttgaaaaagaacaaagttggagcactaatacttcctgatttcaaaacttactataaagctaaaataatttaaactatgtggtactgcataaagacagctttataaaccaatggaatcaaatttagaggtcataaataaactctcacatatatggtcaaatgatttttcacaagggttttatgaaactccgaggggaaaggatatcatctttcaacaaatggttctgggaaaactggatatccacatgcaaatgaattaggttggacccttacctcgcaccatattcaaaaataaaatggatcaaagatgtaaatgtaagaactaaaactatgaactcttataaggaaacagagcaatagctttgccacattggatttgacaataatttcttagatatgacagcaaaagcacatgcaaaagtaaacaaattggactgcacaaatattaagtactgttgcattttaaatacttttgctcactagacattatcagcagaatgaaaaggcaacctatgaaatgggagaaaatattcgcaaatgatatatctaatgttcataggtatccaaggtattaatatccataacaaatagagaccttctaaactcaacaacaattataaaaacaaacactccaattcaaaaaatggacaaacaacttgattagacatttctccgaaaatacatgaattgccaggaaacatatgaaaagatgctaactatcactaattattagagacatgcaaatcaaaaccactatgagataccaccctcattaggaagattactattaagacaaaataaatattggcaaggatgtggataaattgaaacccttatgcactgttagtgggaatgtaaaatggtacaactgctatggaaaacagtatggcaattcctcaaaaaattaaaaattgaattaccatatgatccagcaatcccatttccgagcatatacccaaaataatcacaagcaggatcttgaaaaaaatatttgtacagtcatgttcatagaagcattcttcacaattgctaaaatgttgaagcaacccaagtgaccattgacagatgaatggataagcaaatgtagtatatatgcacaatggaatattattcagccttttaaaggaaggaaattctaacatatgctacaatgggatgaacctttgaagacattacgctaggtaaaataataataaagccatgtatgaaaaacccacagcaaacatcatattcaatagtgaaggactgaaagcttttcatctaaaatcaggtacaaagcaaggatgcctgctttcactactgctattaaacataatactggaagtcctagccagagcaattaggcaagaaaaagtcataaaaacacaatattgtgtcattccacttatataaagtgcccagaacagtcaaaatcttagagacagaaagtagaatcgtgttttccagagcctgttaaggcaggggaaatgagaggttattgtttaatgggtacaaggtgtcagttttaaaaaataaagtgttctggagatggatggtaatgatgtttgcatagcagtgtgaatgtgtttaatatcatggtaatgtacacttaaaaatggttaagataataagttttatgataggtgtttttttaccacaataaaaagttttagacaaaaaaaggaatgaagtactgatagatgctacaacattgatgaaccttgaaaacataaatattatgttatgaaagaagccagacacaaaagatcacatattgtataattccattaatatgaaatgtccagaataggtaaatctatagagattgaaaatgaactagtgtttgcctagggctggaacaaaggagttgttgagaggaaatgggtgtgtgaccactaaaagttgaattgtatggtattagtatatgaattatatgtcaacaaaaaagatgttacaagaagtattaatggaatggtgggcaaaccataactgtggagttgaacatgtaagaaaaatgggttttccaggactgattgatatatggctcatatctcctatgtttaactagcctgtagaagattttaatttctggccaatttccccatcaataacatagagatcataatatttgccttatttttgtgaagattaagtgagttaatccatgtacttagcccagtgcctgatgcatacaaagtgcttaacagggactattacattacatagttttccaaaaggatgaaagtaggttctagagtatctttattgatattccaaaatgaaaataataaaatttttaaaattatgtgtggaattctgtaagaaaaatagttgctacattatcaaacattttttaacttatgaaaggtttagatattaatgtatcaatttcaaataaatgttaaatattacaattatagaaaccttgtgcgatataactgagcattaaaggtgaaatggatagtgtaaaaatcataataacatccccacttaaatggaagtcagagttccagttatctcaaccacctaaaaccaagctgtaaacaaaaacaagtgtaaaagatgtgaaagcaataatgcaaagctaatacagtttgtgaactaagcttgagccatttttaggacagtctttcacagtcctttcacttactttagtctcataaacccaggtctctgaattcccagcccagaaattaggacgtgataatttcaaaaaagaaaaacagttgtgttgttaaaagtaggtactctgacaccagaaaaaaaaaatgcttttaaagaactcacagctcagcagaaatatgcttaactatcccaaagacagtataagtttcagtggaaactttcgttcacagatcaggattgtgttagttttcacggtatgtttgtggtatttcagaggctaccatgcacagtgaggaatagatttcatcttatgccataccccatcttgcttttgttttttagcagtctggctctgtcacccaagctggagtgctgtggcacagtcatggctcactgaaacctctgcctcctgagttcaagtgattctcaaaggttgacagactgacatgcagaaaacaaaaaataaaaagaatgaaaagcaaagacgacctagactaaaagaaaatttttttgtctcttctaacggcaagcagagacaaacattaaattgcaatatcgtacaatcattcaccatctgtaattcacaatctatagtgacaatcttgagcttctaaaaaaggttgatttcactattacctctttagtaaggcagagcactattagttttcaataatttcattcaatttagcctgttgagctccttaacttctgggcccactgggaggtgaataattcataacttctacatgaaagagctcacagactgaaaaagaaaataggcttaaacaaagggagcacagtgtgacacacaaggtacagatttagcttgaaaaatggaggaattaattaggaggagagtgacaataaaatgatttctacaaagtgttgacatcagagctgacatttttttttttggcgggagggagacctgagttttattattactcaaatcagtctccccaagcgttcagggatcagagtttttaaggacaatttggtgggtgggggtaagccagtgagccaggaatgctgattggttaggtcagagatgtaatcatagggagtcgaaggtgtctccttgcactgagttcctgggtgggggccacaagatcagatgagccagtttattgatctgagtggtgccagctgatccatcaagtgcagggtctgcaaaatgtctcaggtactgatcttaagggcagtgtatccttaaatattgtagcctctagctgcatgattcctaaaccataatttctaatcctgtggctaatgttagtcctacaaaggcagtctagcgcccaggcaagaaggaaatttgttttgggaaagggataaactataaact

SEQ ID NO: 386 - DNA, 52138 bp, Homo sapiens
aaaatttcatgcaaatcatgtatgatagaaaaattataacgttaaaaactgattcaattattgagaaaagcaatgatgttccagtagaaaagtacaagcataaataattcacacagttaaagcacaatagtcaacaagtaaatggaaagtgttcaaattaatttaagtaattttgaaaagaacagtagaatgtttaattataaaattagtaagattaaatatttaagcctatacagttatggtaaaatcagtttacatatacatagtttgagtcagcataaacagatacgtatggatttataaacaaaatgctgaggtttagccagaaccctaaaaatgcactaatattttgtcatttcctttttactacttaaaatttatgtaataaatttttaaaatatcatgtacaattaattttcctgcaactccattacaacaagaaaaactgagagaagtttcactatccaaaaagataataaattatattatagaagttataagtaagcatacattaaaataatcaaaataatattaatgatttcaaatataatatgaaatgtaaaatcttctatacagttcttaaatgatttttaaaactatccacaaatattcaagaaaatagaaaactattgaaagtgattgagagacaaagaaaggagaaagcgtaaagctggactgttttggaaacaaaaagttatcctgattgagttgaaaaaaggctgaagaaggtaatgaaggtgttttccattagcaaccatttgtaaattagtttcagggcacaaaacgtgatataaaacatctgagagcatttttagttaacttgcacagttctgctataagacatatttctaaaatggtttggtcctgagtgtcggtaggaagaatatgttctgtaagtaaagatgggatgtatggcagggactttatggagtacagctggagaaccctggagctctcagcaagggagaaggctatgtattaagtaaactcttgcatgatcatcttacgtgatccctggaggaaaatagtgggagtaggacatcacaacctgttctcatttctttgctcagttaggagattaaaagtcaaataattatccattaaaacttatcacctgcgatggctcaagtctgtacttgaggtggctcaagtacaagtacaagtctgtactgcggtggctcaagtcaaacccagcacttggggaggctgaggcaggcagatcatgaggtcaggagatcaagaccatcctggccaacatggtgaagccgtgtctctactaaaaatacaaaaattagctgggcatggtggtgcgtgcctgtagtcccagctactcaggaggctgaggcaggagaatcacttgaaccttggaggcagaggctgcagtgagccaaaatcacaccactactgcacttcagcttgggcaacagaacaagactctgcctcaaaaaaaacaaaaaacaaaaaacaaaacaaaaaaaaccttattaactgatgaaacacaatgggcaccaaaaacagagaacacaaaacaaacaaaaaagatgaaaataaaatgtgttgtagttagtaacattatatagaattttagaaataatttaatgtttgtacttaatatgtgcataaattaattaattaaaagtttctgaaggttttttcttttagacagggcctcattctgttgcccaggctggagtgcagcggcacggtcttggttcactgcagcctccacctcccgggtccaagagattctcgtgcctcagcatcctaagtagatgggattacaggagtgcgctaccagtcccggctaatttttttatatttttagtagagacagggactcgccatgttaaccaagctggtctcagactcctggcctcaagtattctgcccacttcggcctcccaaagtattgagattacaggtgtgagccactgcaactggcctaattaaaagtttaataggatttagcttcaggtctttgaagattggtttttctctttacttaagtaaatatttcagatttggtctttttattaggaaacttgttgaaaaaaattttcatcctatcaaatgatatcttaaaactgtgataaacattaattgtggagtaatgtacataaactatgtgttgacatacaaattatttatagttctttaccatatattacatttttatttatatattaatatttatttatatgttgcttatatgatgtgttatatccacacagatctatttttctagagacaatgccaattctaaattattttcatattttgccatcacaatatatacaaatgtatacacatgtacatacctattttctattcatcataatccagttgtaattatatctcggattttttatttggggtgagcttttgcttccttgttttatgattctttgttcattctaaattttcttcactgaaagtacattatgtttacagtcagaaaaatgatagtataaaaaacttacccaggcagtatcttagctgaactagcaggggcagacacggctcggctttctgctaaaagatttcatgacaggcaaagaaaagaaaggagaacggaattgaatagagatttaaaatctgtactcttatcccaacctacgtaaatcttaggcatgagaggactgcagtataaagctactcagatcctctaccttgatttttgtgttgttctgtattgttatcttcttggagacacttcaaaagagtttacacttgatttgactccaaaaatgttatagtgtcttctttaacaatgatgttattaaatacttttgcattctgggttacatatagttctctgtttcttaatcactaacgacaagtggtaatgagttaaatgaataaaatgcatcaatgacatcattgaaatataagctgtatattctttaattcaggatatttatttgtttttttctcccaagagaaatttgtagatatgcagaaataaaacaaggacaattatatgaccaagataaatataaaccaactttaccagttcacaagaaaaaaaaactgttctattactcctgtgaatatagctttgtatctccttcaaatcccctatagactcacgtaacatgcacagagaaagaatgggtatcaacagtgaagtgtcttagtaagtaaatgccctgatcattatctgcataaatcattcggtgagtagagagggatgcctcaaaagggatctgtgtcttgacaggggcaaggtctaaaagagcctgaagagatgacagatgtagcccttatattatttgggagcattttatgaaaatcaagtgagaaggaaagacgtaaagctttggggactatctattccccaaatataatatttctattcatagaaatatttgaattatttctaaaatggacaaaagccttgatacttgatacctattttctaatatgtatttttgtcaatatgaaaataagtatttcctaggaaaatcaaggaagaattaagtagagagcaataccatgttcttgggctagaatactcaacaggataaataaataaatttttctcaaattgtactataggcttaacataattacttattaaaatttcaagagaattctttgtaaatatagatcatttcatactaaatttatattaaaatgcacaggagttagaatggctgaaacatttttttaaaataataaagttgaaaggatcacacaaatcaaatttgaggcctcaaaatatagctaccatattaaaaacagtatagtattgatggagggatagacataaatcaatagaacagatacagaatccagaaaaggtcatataattgtccttgttttatttctgcatatccacaaatttctcttgggagaaaaaacaaataaatataatatttctattcatagaaatatttgtattatttctaaaatggacaaaagccttgatagttgatacctattttctaatatgtatttttgtcaatatgaaaagaagtattccctaggaaaatcaaggaagaattaaatagagagcaataccatgttcttgggctagaatactcaacaggataaataaataaatttttctcaaattgtactataggcttaacataattacttattaaaatttcaacagaattctttgtaaatatagatcattccatactaaatttatattaaaatgcacaggagttagaatggctgaaacatttttttaaaataataaagttgaaaggatcacaaaaatcaaatttgaggcctcaaaatatagctaccatattagaaacaatatagtattgatggagggatagacataaatcaatagaacagatacagaatccagaaatagacccacacaaatatgctcaagtaacttttaacaaagatgcacaaataattcaatacagaaaagatcctttttttttttttagttcagggctacctgtgcaggtttgttacataggtaaacttgtttcatgggagttagttttacagagtattctgtcacccaggtattcagcctggtagccattagttatttttcctattcctttccctcttcccacccttcaccgtccattaggccccagtgtgtgttgttcccctctatgtgttcatgttttctcatgattgagctcatacttagaagtgagaatgtgtggcatgtggttgagaaaagtttcttttcaacaaattgtgttggggactagcactttcttagccaaaaaattaattttgatttaatctcacatattttacaaaacctaactccaaatggttcctatatctaaatgcataatgtaaaacaatcaaacttgtagaggaagagaaaatctttgtgatctggggtttgatggaattgttcttaaacaggacacctaaaggatgacccataaaagagtgaaataataataatactttatcaacattaaacactttttatccatgaaagacattctatgagagtgaaaagataagctacttattagcaaaaaatatttgcaaataacgtatctgacagaggacttatacatggaatatataaagaatgctctaaacacaggtaaaacaatccaatcaataaaggtgccaaagccttgaacagatctaacaaaaaagatattcagatggaaaataaacatgtgaaaagttattcaatgtcattaaccattagggaatacacattaaaaccacaatgagatttactatgtatctaataaaatgctttaaaaaaattaaatgaaacacattggtaatagtaagtgcaagtgaaaatgcaatacaatggatctctcatacattgcttgtggaaatgtaaaatgtcatagccactatggaaaacagacaatttcttatagagttcaatagcacttttcataaaacccagtaatctcacccctgactgtttaccatagggcaggagatggcaaactatatcttaggaactagctatctattttcttaataaagatgtattggatgtgagccacacctttttatttatgtattgtctatcattattttggctctataactacaaagttaggtagttgtggcagaggccatatggttcacaaccttaaaatactaaacatatgacccttcgagaacaagtttgctgttcaagtaaaacattgcacaaaattgtccatcatagctttatgtgtaatagccaaaaagtagaagcaactcaaatgtcctcagatgagcgaaagaataaacaaacatgttacatccatacaatggagtacttcacagcaattaaaagaaatgaattacttataatacaacagcttggctacatttcaaggacattaccctgtgtgaaaaatatccaaatcaaaaagttgacttactgtataatccaatttatataacactcaaaatgactaaattacagttatgtagaacatactagtgatgactagcaatgaggggtgggggaatgtggggaccataaaaggacagcacacgggagttttctggaggtgatagaatagttctgtatacgactgagtagttctacatatgactgattgtggtgatggttacatgagtgcatacatgttgcaaaattaatataccacacaaacacaaacgcaagttcatgggagagaccatgaaattcagtaaggttggtagctgagttagtagtagagcactaatgtcaatttcctggtctcaattattgtactatagatataagagatgcaggaagttatagttattggaggaaactgggtaaagggtacatgggcattctctgtactatttttatgacttattatatgaatctaagattatttcaaaacaaaaattatttggattatataggctgggatgttttacttttatagcacttttggggaagagaattttcaatattcaagagttataaccaatttcagcaatttttctttgagatacttaaatctatctcaaattttatcagtaataacttctacaagccagtttcatatgtatttgaatgctataatttgccttttaaccctttcatattttttgtaacaacaaacagtttcagacttaatttactttccctgcactaaacctggaatccacaaaaaaaagaggtcccagtttcctagatttataatgctgtgtaagaaacttattggcataaaacagcaatcattttattatacttaaagatactgttaggaattgacgcagggcactgaggtgatgacttataactgttccacaatatttgagcctcaggtgaaaagatttaaatgggttaggactcaaataactgagatttggaatctgcaaatgtcactcacctgtatgacacctgggctattgcctgggccaactgggactatcaaccagaagatttacatatggcttctgcatacagattgaacttcttgccaaatggcaaaaggcttccaagatagtgtcagagagatagtcttccaaaatataaacccataactctctaatatctagcagagtcactaccactgtattgtatcaacaaaagcatgccactaaaaagtacagattttcaaaatgagggaaatgtgattccaaatcttgataggatcatggcaaaatcacatggcagaagaacaagtgagatgagacacagtggagtgagcatctttcaaaataaaattggccacaaaattgaagacaaagttattttctaaactgcccttttatttcttatcaagtatagtttccttctccttttatttgttgctaatgtttgcaggagggcataatctcctgaaattactcagaacaagaaacaaacaaaaaagggcaatctaagtttctgaattaggagaaatattcagcaaataaaaaggagaataattgttgagtactgggcttcaaaaaaaatagacaagagaagatagtgttaattcaactaaaaatcggcactagctctgtgaaaattaactctgtgcttacaaataaataacatcccctggattcagacaaaccaatgtttaaaggtcacagagattagaagaagccaacaaaagactgagatggtgaagcctttgagacagaagagaaaccaggagaatgtggtgttccatagaccatgtgaagcaggtatttccaaatggaaggggaaagtcatgaaatttttctgagtattcagttttgaccaatggatttgattagattgaagaaggcattggtgactgttacaagaggggtttaagcgtagtgttgggaatgaaaaaatgaattaaagtagagattgtagataacattggagtcatcgtattataaaatgagaagtgaattagattactagaaagagatttgggttctatgaacaatttttgagcttttgttgttgctcttcatgatgaaagatgtttggtatgtttgcatattggtggaaataatttggaaaatggagaaattaatgatacaggtgagaaggaataattgaaagagcaaaatccttgcacagaaaagatgggatcaaatctggtagagaccataacaagataggagtaaagatcaacatccagtgaagcaagagacaatgcagaaaaggatgcgtgtgaacagcaggtagttttcttctgattgattctatatctagatgaaaaaataaatgaagtcattagcaaagcacaaagtgaggattggtggttaaggagggagataatgaaaacaggagaggggaaaagcagtgtggaaattatttaggaccgtgttcattaatttaaagcaaggcaagtcagcacagttgcctttgtttttcttgtagacacactctgctgcttcaattcaggcacagggcaggtagagaatttatttgcaaaggattgaggttttctaagacttggattacagatagaaaggaacgaatgggcaggagagtgtgtgcaagggactgactgacagtgatgagccatggaatctaatttagatgtggtgggaagagagaaaatgaagggaagagaatagtgaaaaagtgtcagggtcattgaatgtttggaacaaatttagtagagtaagtgagctaaaaagattgttgaaatggtctagagtgtgatgcttaatatttagatactttaggtagtgtagtaattggaaatgacaaggtttagatagactagaatcaatagtggagactactaatagctcacagggacttctctggtttcttgattggacatagctatgtgcattcccattgacttctgaaccaccataagtaagtttcctcttagtgagatcattaggctgtttctgtaaatttccccattaaatgttaaatttctctcaggctgggcactttgttgcttgcttcagctagtatcctctagtcttctctgattgtttcccactgtaatctctttgtattcaataggatcctcgggcatggacctttccaagctataaagtcactcttctccagcaggggagcagagcttccagtccacatagcctgcctgcccatccagggttcaacttctgagccacggaattgggctgcgagacagaggtggatgaaagcatccgctctcttttactgaattttatggagactttctggaaaaaatatttcccaacattatgctgtttggccaatttccagagacaaccaatggttacttttaaatttttatccagttttattgctgccttttggttgggagtgaatataccaagaccctcacatagccattctcgaagtcccacctgaacaaaatgattttgaattataattctgttcttcaaacatttcaggaaacgttacttggcaaaaattattctttttttttttttttttttttttgagacagagtctcgctctgtcgcccaggctggagtgcagtggcgcgatctccactcacggcaagctctgcctcccggttttacgccattctcctgcctcagcctcccgagtagctgggactacaggcgcccgccaccacgcctggctaaattttttttgtatttttcagtagagacgggtttcaccgtgttagccaggatggtctcgatctcctgaccttgtgatccacccgcctcggcctcccaaagtgctgggattacaggcttgagccattgcgcccggccagcaaaaataattcttgattagaccttttatagtttatgaaatattaaaactgttaagaaggtacctaattcttagtgccagttttaaaagggaatttacaactacaaaagtgatattgttgtattaagatgaggactgatgacttgcacttgcttgccttttgaaacagctgaacccttggctagaaaaaaaaaaaaaacccagggggccggcggtggggagcttcctctctcctctaaacagtccatttctgattgttccaaactcagagactcggtgactacaacaaggaaattgaacagcagttattttgcttaaataaatattacataacgagctgagaatattattgtgaagacactgattagatactatttgcttatttcacacaaccctccatgaactttgatgttttccacaaagggctttactaaactagcttccccttagtacattgaaattcaaagtcatgcttgtaactgttaatgaaagcagatttaaagcaacaccaccatcactggagtatttttagttatatacgattgagactaccaagcatgttgctcttattcagtgtaatcctaatctcatgggtatccactgttgggggagaaggtaagttgaaaacagatccgaatattttagttccttttcaaatgtatttattgattgtgtgtgtgtatgcatacaaatatttttaaatgaataaatagctgaggataatttgaaggggtatcacaatattcatctattttctggaaatattttccaacatgcaattagcaggaaaattgaatgaaattaattctctccgttctctagtttgctaagggtaaatggtcaccaaatagataatgtaaagagaaatcaaaggagagaaaatctgctataataaagatgacaaggtgaaatattagtgtaattctgcataaactctgcaatgccactgactagaaaaatcaaccccaaaagatttggccaccttcattatgttttgagaattttattttcatagatttgataatttacattttaaatgttattaaaatgaaggaattctcatttcagcctaattatcattcaacagggaaatatattttaatgaaacaatagaaaatattatttttatatataaaccagtgaactgccaaaaaattgtttcttctgagctcttccacaaatttcaaaagtgaaataatatatcacttctttattaatactataaactgattcttataacattataaactatcccattttatttcatgtggaaattaaagccactatatcaaaaggattgcaaacaaaatctctaacaaggtctaggatactgattaaactatgtgtgtacgtgaagtttcaatcattgtgctatatactctttgatttccagaaagtttttattttactgctttactgctttctaatgtttacagatctttaaattttttgaacactttcttctcagtcctgacataagagaaaaatatgaaccataaaatgctttctttttaagatatgcccttacaaatgttgcaaaacattatttctatgggcctaaaattcattttattttgttttcacttttagtactgagctataatcacaagagtgcgattgcatgagtgtatttgatttttcttaagtctgtgtttatgatatttattaagtggcttaaacatctgttacaaatggcattacacaaggatttctaaaggggggtggaagcagaggaagataagtgaaaattatgaggataatatgtagaattttgacaattcctaaccccacaaaactttcaagcttcagtccagtcccaggataaactttagtgaaattctattaaaagttgtctaggtgttaaatgacctgtaagtgtgcattacacttttgttttggtgtctatttagaaactggccaaacagcagaaataacagacgaaagcaacacttttgtacaaatagaaaactgcatgcttccagtagcaaaacatgaatcaagcaatatattgtgcttcatgctgtagcaaagaagctggaaagaatatgacaacgccacccacccctcactactacttagagtgtcctaaaagaaaagcaaaatgtaaataggcaaataaattgcaaggttttatatataggtaattgtctgtgtgtgtgtgtgtgtgtgtgtgtgtgtgtacactcatacatcacttaatgataggaaaacgttctgagaagtgtgtctataggcaatttcgtcctcctgcaaacatcatagagtgtacttacacaaacctagattgtatagcctactacctaactaagctatacggcctgtcactcctagactgcaaacctgtacagcatgttactgtactgaatactgtgggcaactgtagcacaaatgtaagaatgtgtttacctaaacatataaaaggtacaataaaaatacaatataaaatattaagaatggcagacttgtatagggctcttaccgtcaatagggtttgcaggactgaaagttgttctgggtaagtcactgagtgagtggtgtgcaaatatgaaggcttagcacattaccatacactactgtaaacttcatgaacactgaatacttgagctaggtaaatttattttatttatatatttatttcaatattttggggggagcaggtggtttttggttacatggataagttctttagtgctaattactgagcttctggtgcacccaggatagactaaatttatttttaaaacttttcttcaataataaattaatttatgataagctttctactttatcaactgaaaatcttttaacttgtaactcttttgttttagcttaaaacacaccttgtatagatgtacaaaatattttttctttctatccttattctgtaagatttttatcttttaaattatttatttatttaccttctacacctttttgttaaaagcagacacaaacacacacattaacctcggcctacggagggtcaggatcatcagtatcactgtcttcctcctcactcttgttccactagaaggtctttagggcagtaacatgcatggagctgtcctctcctatgataacaaagccttcttctggaatagttcctgaaggacccgcctgaggatgttttacagttatttttttttaataagtagaagaagtgaactataaaataatgataacaactatagtacattaaatacattaaccagtaccatggtcatttattatcattatcaagtattgtgtactatacataattgtgtgtgctattgtttatatgactggcaatgctgtaagtttgtttataccagcactgccacaaacatgtgagtaatacattggattatgatgttgtggtggtcatcagttgataggaatttttcagctacattataatcttatgggaccactgtgatataagtgatcagtcattgaccaaaacgtcattatgtggtaaatgactgtatgtctgtatatatacgtgtgtgtgtgtgtgtgtgtgtgtgtgtgtgtgtgtgtatcccagaagaaatatattcacagtattctatcagaatgtcgagacaaggaaaattattttctgcttttggagtgggttgttgtgtaacggcaggcttgccaaaggacgataacactcctagcaccattgcggatgtgcacaatggttatacgatgaatgttgtagagcaagttctaaaggataggtagaatacaactggatggtgagaactaagttattctggatagcgaagaatatgtaagtacatatgcatgaaaatcaagtactataattttgcaattttcaaaaagtaaatgatatttaaaaggagttatgataggttaatactatcaagacacgagggagtctttccctcagtatcttctccaaaactatctaatgtcaatttttaaacagttaggtaataaatttaaggtttcacaaggttaaataccacaagaattatttcaaatattgtgcaacattaaatattacttctaggtagttaaaaaagagaaatttcccttgatttgtcagctgaatttctgcatgctttttctaaataaggtgaaaaacaaaacaatttcttatgcagcaatgctatattcaggaaatatcttgagctaaaaaatgagcacactatattgaggaaatatctcgagctaaaacagcattcaaagataaagtacatcaaatccatagaatgtacaatatcaagagtaaaccctaatgtaaactatgggctttaatgacaataatactgatagtgaagggggctattcatgtggcagggaagaggaagtggtatataggaaatctctgtaccttccactcaattttacagtaaaaaaactgtaaataaaaaattaagtctaataaaaaatatgtgtatatataaatatatatatacacaagaaaaaatagagtcaaaacatgaatatttcacccattttctacattgttttaccatatcttgcaccatagtgcatatggatgtatgtgtgagtgtctatataaatatatccagtagtatcctcagtatcattagtatccttaaggaattgttccaggactcttttcacccccagcagataccaaaatccacagatgctcaagtctctaagagagaatggcgtagtatttgcatataacatatgcacatcctctcatataatttaaatcatctctagattatttataatatctaacataatgtaaatactatataaataattgttatattgtatttttaattgcattgtttttattgttttattatctttttattgttttttctttttcagatattttggacttgcagtataataaacatttatgtatacagcatttaccagaatttagctctaattttatctcggttgagttgttcttagtgattttcttatactctttaaattatttccactgaaaccacataaactttgtaaccagaaagtaatcagaatattaataaacaaaaaatcaaattacctacccaacatttttactgcaccagaaaaaaaaataggacagatttttctggtggaaatacctatgacagttgatgagaatagaaaaagaaataaatctgagagctgagaacaatcctatcactcctctactgtacactacatagaccagggagatttgctactcttacagtctgccttcattcttaaattgttgtgtgaggatattgttcttgaagacattgcagaagagttcatatttcatatcattccaaaatataaattttatattcattaacaatgacctcgtcggtccggcatggtggttcatgcctgtaatcccggcagtttgggaggccgaggcgcatggatcacctgaggtcaggagtttgacaccagtctggccaatatggtgaaaccttgtctctaccaaaaatacaaaaaattagtcaggtgtggtggcaggcacctgtaatctcaggtactcaggaggctgaggcaggagaatcacttgaacccagtggaggctgcagtgagccaagatttgcgtgattgtacttcagcctgggcaacaagagtaaaacctgaaactccctctcaaaaaaaaaaagatctcctcaaatactcttctattcttatttagggatctttcttcattccaaattagtacactggaaagcatttaagctaaaggcatttaagctgaatgaaaaacaaaactataaatgagatgactaaaatataatctagtgattcatcgatgtagctctttatttaattcttcagttttgtgttatttttcccaggaacactttgtgattttccaaaaatacaccatggatttctgtatgatgaagaagattataaccctttttcccaagttcctacaggggaagttttctattactcctgtgaatataattttgtgtctccttcaaaatccttttggactcgcataacatgcacagaagaaggatggtcaccaacaccgaagtgtctcagtgagtaaatgccctgttcattaaatggatgtcattcagtgaatagagaaggatgtgccggacaagatcataaggtcttgataatcacaagggcaatgaccagaggagctggaaaaatgggagatgtagtcctcctattttgagacccctcctatgagaatcaatgaagaataaatatatcaactgtcttgcattacctggaaatgccctacatgttgaaatacattaatttttttaaactgatgattaatatatttgactgctaatagttctttactaatattcattcggtagcagcctgatcatagttttcctttaaaataagtcattttatatagatattctgttttgaatttaccgttctcttgcatattgcgaggtaaggtttggtattttaacttttatattttcaataaatcatttatttggtccttcaaagtgtagctatattaatcctccaataaatgtagagaccagactccaatgataacaggtgcattaaaaaagaaaaacaatgggagagagaatagatgaggcaacaaaggagatagtaatggtctttctccttttgtaagaaacatttatgagaattgcgagaaatatttatatgaagatattgttttggtgctagaagagtttataaacacaagatttttattataaaaaccatacagcaacaacatgaaatattaactttcgtatatatatatataggaacaaaaaatatatttcatcatttatacggtagcatgacccaaattcttttgaaaatatttacacatgatgtcagttttcaaagttttcctttcttaatgaaatatttttaaatgcactttttttgctacttccatcttgtacattaatcaatttttgttccttaggaatgtgttcctttccttttgtgaaaaatggtcattctgaatcttcaggactaatacatctggaaggtgatactgtacaaattatttgcaacacaggatacagccttcaaaacaatgagaaaaacatttcgtgtgtagaacggggctggtccactcctcccatatgcagcttcactagtaagcaaaataccactctctcagttttgctaattatttaaagaaataaatctatagtttatagattaaatataggttaaatataggtttcaccactacttctatcattatttatttgattttcggttccaattgtgtctaagtagatgtgcaataacatagtttgcctacctatataaatcaaatgtacgtaataagaagaaatattagagaagaatacactttgaagataatccattaatgtaacaactgtttgttgtttatattgtcaggttagttgacaataaatggttacaaaactgaggtattaaagtgcaaattagtccaattacagttaaaatgtcttataaggaagtttttaatatttatctttatttaaattaatatgcttgagtcaataaatcattttctaagttgtaaaaagtccatacttctgagaggtatgtgtatttgtgagcggcttagaatttggaaaacgattcttttggaagcctgtggtataaatgatggcacctcacagtcctgtgtgaactcttgtaattcttcatctttatagctcttcagtaattgttctttgcccagcccaatgcgattccatcctatgcttacacacctcagtattcaaccaaacactcaaggaaacttccatagtctttctcttcataccactttctctctgctactatgtccagtaacttctggccaccatagtcaccaagactgaccttactagtctcaactaaagaagaccactgagttcttcctgggttctccctccttgcacagtctagaaaaggcttcccaataaacagctgggctttcattgactttgctttattattttgaagtattgagggttttttccttttttcagtcatcacagttctgtactgggtgatttccagcattctgaaaataaattttgtaaaattttctaaattttttttcagtgggatgctatgttgatagcagctactccatcctatcaagaaatagaatctgtggtaggtttttcaaaagatgttatgttatcaaatattattccacatcttcaactcttaatttaaacctctagagccaggcacagtgatgtgcacctgtagtccccgccactggcaaggctgaaataggagttcaaagcttcagtgagttatgactgcaccagtgcactccaacccaggcaacaaagtgagacccttccccactagaaaaacaaaacaaagtaaagcaaaatgaaatttaaacctctagaaatggagtctttttaaaacagctggaactgcgatagtttttcagtaaacagttacgtcatggtctctttcaattacaaggggttaaaacattattaacatttgcaaaaaaaaaaaataacaaatgttactaacactagaaaattccagtgattgaaaagggttcaaaatgtataggcttcagttatggtataaatatttccatgctttctcttatccatacctgttcatgtcatgaacaagctctcttcattttgagagatgatggctattgtcagaccaacaattatattttagaagcttgacaaattaagtttggccagcgtaacccatacaagctggctctgtgtacagtctgtaagattttgttagtctttgaacaattcggttgctttgtgacacaaaaaatatcccaggcttaactcatgtttccactgccccagaactagaatcagccatacctccaataagtcctggttccatttagtgggcaatgacatttagaaactaagttgtcaaaataaacttgtttcaaaatttagcacattttatttaatcagaaaaagcacatatcttattgttcaagttctcagaatattgctgcctttccctttctgcccgttgcttattccaaaagcacaagacaacatattgaggttatcagagtagatggacagatggaccaagtcagagtctccaaagtgaaagaattcagcagaacactctgtgcctaaggttgaatggtagctcacgaacactgtggaaagttaataaagtttcagggcaactagactcctaatgatagcggcacagtctgtttattcatgtaaggtaacatcttgcaagttatggtaatccatgttgcagggattagtatggcgtcatctctgggggccgttattccatttacaacaccatgcaataaccatatatgaataaagcagctggaaaaccctacattggccaagatcgattattttctttttatatatatatatatactttaagttctagggtacatgcgcacaacatgcaggtttgttacataggtatacatgtgtcatattggtttgctgcacccattaactcgtgatttacattatgtattttgcctaatgctacccctcccctacctcccaccctacaacaggccccagtgtgtgatgttccccaccctgtgtccaagtgttcccattgttcaattcccacctgtgagtgagaacatgcagtgtttggttttctgtccttgtgatagttttctcagaatgatggtttccaggttcatccatgaccctgcaaaggacaagaactcatccttttttatggctgcatagtattccatggtgtatgtgtgccgcattttcttaatccagtctatcacttacggacatttgggctagttccaggtctttgctattgtgaatactgccacaataaacctatgtgtgcatgtatctttatagcagcatgatttataatcttatgggtatatacccagtaatgagatcactgggtcaaatggtatttctggttctagatccttgaggaattgccacactgtctaccacaatggttgaactagtttacactcccaacaacagtgtaaaagagttcctatttctccacatcctctctagaatctgttgttccctgactttttaatgatcgccattctaactggtgtgagatggtatctcattgtggttttgatttgcatttctctgatgaccagtgatgatcagcattttttcatgtgtctgttggctgaataaatgtcttcttttaagaagtgtctgttcatatcctttgcccactttttgatggggttttttcttgtagatttgtttaagttctttgtagattctggctatcagccctttatcagatgggtagattgcaaagattttctcccattctgtacgttgcctgttcactctgatggtagtttcttttgctgtgcagaagctctttagtttaattagattccatttgtctattttggcttttgttgccattgctttttgtgttttagtcatgaagtacttgcccatgcctttgtcctgaatgctaaggcctaggttttcttctagggtttttatggtttttaggtctaacatttaagtctttaatccatcttgaattaatttttgtataaggtgtaagtaagggatccagtttcagctttctacatatggccaggcagttttcccagcaccatttattaaatagggaatcctttccccatttcttgtttttctcaggtttgtcaaagatcaaatggttgtagatgtgtggtgttatttctgaggcctctgttctgttccattggtctatatctctgttttggtaccagtaccatgctgttttggttacttgtagtatagccttgtagtatagtttgaagttaggtagcctgatgcctccagctttgttctttttgcttaggattgtcttggcaatgcagccccttttttgattccatatgaactttaaagtagttttgtcctattctgtgaagaaagttagtggtaacttgatgcggatggcattgactctataaattaccttgggcagtatggccattttcacgatattgattcttcctctccatgagcatggaaagttcttccatttgtttgtgtcctcttttatttcgctgagcagtggtttgtagttctccttgaagagattcttcacatcccttgtaaataggattcctaggtattttattctctttgaagtaattgagaaggggagttcactcatgatttggctctctgtctgtctgttattggtgtataggaatgcttgtgatttttgcacattgattttgtatcctgagactttgctgaagttgcttatcagcttaaggagattttgggctgagacgatggggttttctaaatatacaatcatgtcatctgcaaacagcaacaatttgacttcctcttttcctaattgaatacccttgatttctttctcctgcctgattgccctggccagaacttccaacactatgttgaataggagtggtaagagagggcatccctgtcttgtgctgattttcaaagggaatgcttccagtttttgcccattcagtatgatattggctgtgggtttgtcatgagtagctcttattattttgccatatgttccatcaatacctagtttactgagagtttttagcatgaagcgctgttgaattttgtcaaaggccttttctgcatctattgagataatcacgtgtttttgtcattggttctgtttatgtgatggattacatttattagtttgtatatgttgaaccagccttgcatcccaaggatgaagccaacttgattgtggtggataagctttttgatgtgctgctggatttggtttgccagtattttattgaggattttcacatcgatgttcatcagggatatgggtctaaaattctcttttttttgttgtgtctctgccagtctttggtaccaggatgatgctggcctcataaaatgagttagggagtattcactctttttctattgattggaatagtttcagaaggaatgtgaccagctcctctttgaacctctggtagaattctgctgtgaatctgtctggtcctgaacttttttgggtggtaggcaattaattattgcctcaatttcagagcctgttattggtctattcagagattcaacttcttcttggtttagtcttgggaggatgtatgtgtcgaggaatttatccatttcttctagattttctagtttatttgcgtagaggtgtttatagtattctctgatggtagtttgtatttctgtgggatcggtggtgatatcccctttatcattttttattgcatctgcttgattcatctctcttttcttctttattagtcttgctagcagtctgtctattttgttaatcttttcaaaaaaccagctcctggattcattgattttctgaagggcttttgttgtctctatctccttcagttctgttctgatcttagttatttcttgccttctgctagcttttgaatgtgtttgctcttgcttctctagttctttcaattgtgatcttagagtgttgactttagatctttccttctttctcttgtggtcatttagtactataaatttccctctacacactgctttaaatgtgtcccagagattctggtaagttgtggctttgttctccttggtttcaaagaacatcgttatttctgccttcattttgttatttacctggtagtcattcaggagcagggtgttcagtttccatgtagtggtgcggttttgagtgagtttcttaatcctgggttctaacttgcttgcactgtggtatgagagacagtttgttgtgatttctgttcttttacatttgctgaggagtgctttacttccaactatgtggtcaattttgggataagtgctatgtgatgctgagaagaatgtatattctgttgatttgaagtggagagttctgtagatgtctattaggtccgcttggtgcagagctgatttcaagtcctggataaccttgttaaccttttgtctcattaatctgtctaataatgacagtggggtgttaaagtctcccattattattgtgcaggagtctaagtctcttcgtaggtctctaaggactggctttattaatctgggttctcctgttgggtgcatatatatttcggatagttagctcttcttgttgaattgatccctttaccattatgtaatggccttctttgtctcttttcatccttgttggtttaaattctgttttatcagaggctaggattacaacccctgcttttttttttcctttccatttgcttggtagatattcctccatccctttattttgagcctatgtgtgtctctgcacgtgagataggtctccggaatacagcacactgatgggtcttgactctttatacaatttgccagtctgtgtcttttaattggagcacttagcccatttacatttaaggttaatattgttatgtgtgaatttgatcctgttattgtgatgttagctagttattttgcccgttagttgatgcagtttctacctagcatagatggtctttacaatttggcatgtttttgcaggggctggtaccggttgttctttttcatgtttagtgcttccttcaggagctcttgtaaggcagacctggtggtgacaaaatctctcagcatttgcttgtctgtaaaggattttaattcttcttcacttatgaagcttagtttggctggatatgagattctgggttgaaaattcttgtctttaggaatgtcgaatattggcccccactctcttctggcttgtagagtttctgccgagagatccactattagtctgatgggcttccctttgtgggtaacccaacctttctctctggctgccattaacatattttccttcatttcaaccttggtgaatctgacaattatgtgtcctgctcttctcgaggagtatttttttggtgttctctgcatttcttgaaattgaatgttgacctgccttgctaggttaaggaagttcccctggataatatcctgaagagtgttttccaacttgattccattatcgccctcactttcaggtacagcaatcaaacgtagatttggtttttcacatagtcccatatttctcggaggctttgttcatttctttttactcttttttctctaaactttcttctctctttatttcattaatttgatcttcaatcactgataccatttcttccacatgatcaaatcggctattgaagcttgtacatgcatcacgtagttctcgtgccatggttttcagctccatcaggtcatttaaggtcttctctacactgtttattctagttagccatccatctaatcttttttcaaggtttttagcttccttgcgatgggttcaaacatcctcctttagcttggagaagtttgttattaccaatcttctgaagcctacttccgtcagcttatcaaagtcattctctgtccagctttcttctattgctggtgaggagctatgatcctttggaggagaagagacactctggtttttagaattttcagtttttctgctctggtttctccccatctttgtggttttatctacctttggtctttgatgttggtgacctacagatggggttttgttgtggatgtcctttttgtggatgttgatgctatttctttcgttttttagttttccttctaacaatcaggtccctcagctgcaggtctgttggattttgctggaggtccagtccagaccctgtttgcctgggtatcaccagcagaggctgcagaacagcaaatattgcagaacagcaaatattgctgcctgctccttcctctggaagcttcatcccagcggggcacccacctgtatgaggtgtcagttttccccctactgggaggtgtctcccagttaggctacacgtgggacggggacccacttgaggaggcaatctgtccgttctcagagctcaaacaccatgctgggagaaccactgctctcttcagagctgtcagacagggacatttatgtctacagaagtttctgctgccttttgttcagctatgccctgcccccagaggtggagtttacagaagcagcaggccttgctgagctgcagtggtctctgcccagttcaagcttttccagctgctttgtttacctactcaagcctcagcattggcggacgcccctccccctgccaggctgctgcctcacaggtcgatctcagactgccacactagcagtgagcaaggctctgtgggcgtggtaactgccaagccaggcacaggatacagtctcctggtgtgtcctggagactggacacaccactaagaccactggaaaagtgcagtatttgtgtgtgagtgtcccgattttccaggtacagtctgtcacgggtttccttggctaggaaagggaaatcccccaaccccttgcacttctattttttctaagaccactggaaaagtgcagtatttgtgtgtgagtgtcccgattttccaggtacagtctgtcagggcctcccttggctaggaaaggaaaatcccccaaccccttgcacttcccagggaggcaatgccctgctttgctttggctccccctccatggactgcacccgctgtccaaccagtcccagtgagatgaaccagatacctcagttggaaatgtagaaatcacccatcttctgcatcgatcacgctgggagctgcagaccagagctgttcctattcggccatcttggaacagaatcaagatcaattattttcaatggcattttgtttttaacaattagttaaaaaaagactataaacaaccaataaagaactgtcatgcaaaatactggaataacaaacagagatttagagatacacattttattttagtgaattaagacacattctcttgggatttgctcaagtaaactgtgatcaatacattaaagtgccaataacagtatataaaactagctagtttgaaaatatttatgagattattagttagaacatatttcaattttatttttgtgtatgcttgatttattcagattatttttgtcttgaatgtcaattatttattttacacaagaattaatatataattttataaactaaccattaatgaaagattattaaatgagaaaaacacacatattcatatacatatctatttctaattgaatcagaatatattcataatgagttagtttttacaaacatattagtgatagagttgagtataagggaaagattcaaaaaacctagatgggttttttaaaagtctttgatatttagttacccttttgtaaaactgggaataatctgcttttaaatattcccttcaacttaacatttattagttgtatcctgtttgggtgtttcacatatctactgttttttgagacagtgtctcactctgtcacccaggctggagtgtagtggtgcgatctcggctcactgcaacctccgcctcctgggttcaagtgattcacctgcctcagcctccctagtagttgggactataggcgcccaccaccccatgcctggctaatttttgtattttcagtagaggcagggtttcaccatgttggccaggctagtcttgaactcctgacctcaggtgatctgcccaccttggcctcccaaagtgctgggattacagacatgacccaccatgtcaggcccacatatctactttttatacatcattttttttatttgacaaaaagtaattaaatatgttgcaattttattttgttacttgaaggaattttttgtgatttagtgagaaaaaaatattcctattctgtattataaacaaataatgttattaaacttatttattaaacaataaaattagaactaatattgctaattaaacaaattaaataatttactgtatgagtaacttcacaggacattcttactacaatcctgaaaagattctcatagaaaatgttaccttgctatatacagtttcccaatttgcctgaggggtcttagatatatttattgggtataaataattagtctatatgttttctcgaaggcaagaatatattttatactctgtatatgaagccccttgcatcttatttttatatagcacacattaaatttgtttctgcaatgaaaattcacatatgttcatttaattttatttttagaaggagaatgtcatgttccaattttagaagccaatgtagatgctcagccaaaaaaagaaagctacaaagttggagacgtgttgaaattctcctgcagaaaaaatcttataagagttggatcagactcagttcaatgttaccaatttgggtggtcacctaactttccaacatgcaaaggtcagtatttattttagaagtgatgaaacaagaatttgatttttataataatgcccatatatttttattggagcttatattacatctataatctgacaaagtggtaaaatggcaaaggagaaaggatgcagttctatagtaattgagctgcatagattatttaggtgtccgtaatcaaggagtaattctacttctgtgttttacaatacataataggattttataggtcaaaatatagtagctggaattgagacgtcttaggatttttccatctagctcaataaaaaatttatactttttagaaatattgtacgaacaatgttatattttattaagtaattaagaaaataagtcattgcatatacgaattattcattagaaaacagtgatgatttatacctgcttcagatggcactatttttatcaaaaatggcttatcacattatttgaagtatgtattagtcccttttcacaatgctgataaacacatacccaagactgggcaatttacaaaagaaagagttttaatggactcacagtttcacgtggctggggagacctcacaatcatggcagaaggtgaaaggcacatctcgaatgatggcagacaagagaagagagtttgtgcagggaaacctccctttataaaaccatcagagctcgtgagacttattcactatcatgagaatagcacaggaaagatccgccccataattcaattacctcccaccaggttcttcccacaacacataggaattgtgggagctacaattcaagatgagatttgggtgaggacacagccaatccatatcaaagtatttatagatattaataaaagttataactatacattgcatatgtatattatatcacatatttgataactatttacttttatataactttcagattattgacctacttaaaaatcttcaagggtacaacttaatatcctgattataataaacagcctacaaaatattgggaaagatggacaatcaggatgtttaaatatagagaggatataagattgtactaagaaaatattattaatttggtgaaatgtaaaagatattttgtatatgtaggcaaatgtctttatgagatagcattctgaagaatttaggactaaaatttcactgtcatttactttcaattacttcacaaaaaataagtaaatagggcaaagtgtaacatttttatatctaggtaatcagtttataagtgttcattatgcattctttctcctttcatttgctcaaaattgttcatcatgaaaagtgtcaatatttgaggaaacgaatgcagtcaatacactatgtacactgcaaaaaacacatgtccccaaaaatagaagtgcaatataaaggcaattaatttctaagtcaaaaatttagtaactccacatttttctatacttataagaccatttaagcattatttatggtttctttataataggacaagtacgatcatgtggtccacctcctcaactctccaatggtgaagttaaggagataagaaaagaggaatatggacacaatgaagtagtggaatatgattgcaatcctaattttataataaacgggcctaagaaaatacaatgtgtggatggagaatggacaactttacccacttgtgttggtaaataaatattaacatttaaacaggacagttactattactttgcacttatatataaatacacatgtaaacagatttaaaatattttcagagtaagcactcattttattacattttcttagaacaagtgaaaacatgtggatacatacctgaactcgagtacggttatgttcagccgtctgtccctccctatcaacatggagtttcagtcgaggtgaattgcagaaatgaatatgcaatgattggaaataacatgattacctgtattaatggaatatggacagagcttcctatgtgtgttggtgagaaaacattcctaaactttatatttgattatttatcattttgattgggattgtataaagtgtataaatctggctagaattacaattttattgatactgactcttccttccacaagtaaaatatgtcaatccatttattcaggtcttacattaaactttaccatatggttttatgaatttcttgttattactgcacagatttcttcaccaatttatttgggatttttctggcatgatgaatggaaacttttattaatgtatatgcttgaatagttatactttctatatgcaagaatgtgatttaattgcatacattatttttgtttccagtaaccttgttgaatttctgtattagttctaatatttaattgggatattgtatttctacaaatgatggcgatttaatttcttttatttcattgctttaacttagtctttacctcagcatgttccagatagaacaacctaaaaaatagcaatgtagcttgagttctattaaattccagagtgtttggaatcccttcatagaagaagagtaggggactaggacccaggaactaggcatgatccttgctctttctggtcccataattctcttatttctattcctaattatctacttagtttgtcggtttcctccacagaagtagtaagtagtaagtagtaagtaagtagtaagtagtaagtagtagtagtctatcagcctgtgtgctctactcttaccttgcagcctcaggacttccagccttgacacttaagtacttgcaggtattttttttcccgacaccctcagatcctggcctcttttgtcctatctctagcaacctcaatacattaaagcctctaattttgaactttaaagacaagcagactttccgccgctgttctcctccttacagaaactgaaacagaaccgcctctctctccatctcctggacttttggataatcaactggcccactcattgctgggaaaaattactgtaggtgttgccagccgttgtcccagcaaatacctggtcagtggccatccgtgatgacctattgtgagggaatgttttccactaccaggagccagaacgctgttatgggaagatgtagatcatatatcttcatggtcatcaacttttatgcaaggagtacataaatatcaacctctagccccatatggggtgaattaaaaatagaaactattgcagaaaacacctgtaagcatagaagtagcagagcacactccatgtctcattatcccatccttttacacactaaggaaaaggctccataactatctacatgtttatgggaaacgggaaaaaaatgtaacaatgagaactacttagacaagcaagaggcttagtaggaatttatgttctgaagctcagttgtgttattatcagtgagttcttcccctgagaatactctgacttactgagtcagagtttttgctgagcttttgaaatgtgagtcattgaacctcaagggggacccagatctatctcttactgatgctttgcttcctgcagacttacccatgtattgcctctttttattatttaaatgttttgaagatatttaagatagtttagtgcaaaacaatcatacatgtgtacattttcagagcctctaacaattcatttgtagcttcctaagaactatctttcagtcaaaactcccactaggaaaacctatcttgcactttcatttcccagaaaactttctgacctactttcctgtcattcaaagatgggatacagttttttgttttattttttctttttccaacagcattgtctattttgtgcaatgagattaagaataagttttgtgatgttgcttaaaagcatcaaacataattatgctattaatattgcagatattttattgacataattgtttagtttctatttaatattattttttatagcaacacaccaacttaagaggtgcaaaatagcaggagttaatataaaaacattactcaagctatctgggaaagaatttaatcataattctagaatacgttacagatgttcagacatcttcagatacaggcactcagtctgtataaacgggaaatggaatcctgaagtagactgcacaggtaagatttgtttaaaacattttgttgatcttgttgcttctttacaagaaaaattattttgaaattagaatgtttttaaattaaatatttattgtggcatataatttctatgctaatagtaaagtagaaactagttataatactctttccagacaaatgttattctttaaaagccttggctttctggtaaagatgagagagtaaagctgtttttactctattacagtctcacaaaaccttgaaagaaaaaaagaaataaagaactgtaaaaaaagaacaaaacttaatcttcaatgacattaagaaacaattaaaaccccaattatgcactgtgaaacaaaactaacagatattgccaattctggaccagacagtaggctgagtaaaaagtaggctgagaaagaaaatatatttgagtaatcaattatttccctaagaaaaagtctcacattcctcgaaggcttatattcaaatcatttactttgagtaataggattataaattacaagtaattataaaatggggcaccatattagattaaaataaaccagaactagagaaaacaaagtgcttataaaggaatgacaataaaagagagaagatagactgcagacttctcatcagcaacgtcaaaagccgaagaaaataaggtaatctcttcaaagtgcttagtgaaagtaactggcaaccagtcattctatgtaccaatataattcactaatgattccaaaataaagaaatttgcaaccacaggaaggataggagtttacacacaaggtcatagtttgaaagaaatcatataaaatacacattaatgatataaaatactaatttatagcaaaaagtgtgatgtcattagaaattgtgaggaaaaatactggaatatattcttaaacttaaatacataaggatttcaaaaagataagataactacaatttgtttaaagcaactggaacatttttatgtttataaaatatttgatttcattatatattttttctatttgaggaagagaaatattctgatagttgaaagaagtttgaagccttttatgtgtccatgaaatgtttacttaaattggccagtcattctgcccaaaataattctcacaacttcaaatattaaagccctatagatgactttttgtaaccacaaacaaataacattaaaagtgtataaaaagttatccacttccttacctttcattttgggtaagcaaataatttacttccaaataacctagtgatgtaatgtttaaaatattaagaactatgttataattacaaggatacgtagtaaaacctatgagatgcaacctaagcaaaatttagaatgatgtggcattcatagtcttaaacttatctattttgggaaaaagtatatatatatatatatatatatatatatatatatatatacacacacacacatatatatacacacacatatgtatatacacacacacatatatgtatatatgtatatatgtgtgtatatatatgtgtgtgtgtgtgtgtgtgtgtatatatataatatatatgtatatcctaaaaagctagggggaaaatgaattcagatattaggaggaaaaggaaataataaaagtaaaagcagaagaaaatgaaatagaaccttgtatttccaactaatccaagatatgaaactaatgttttgaaaagattaataagcagagctgtctaaatgagttgactctaatcaagaatggtgtgcatacacaaataaacatttctacaaccaaagagtagatgaaaactgaaatacagggaataataatatgagttcaattttttaaataaataaattacaagcataaagagaaggaaaatactatgagtcataggtatcaaaataaggaagaagccttatttaaagttttgagaagagctggtagctagtagtctggaaattaggtaagaacgttattaggtggcaaatatttgttacacaccttgcttgttcttgagaaaaataataaaatttctcattttatgcatcagaaatacatggcttcaagaagttatttggtcaaaatcaagactggaacttgtttccagatttttatatcagtgctgtttcaactagactctgtctttactagacagaaatttctaaacagatgtccaattctaaaaggaaagtaaggtgggcaactgagatcattatgtgtaatgttctttttacctaaaatataaaaacaatagtatatgtgtgatatttgaatatctaactcacttagttgggactttgttgatgaaattctcattattatttgtacatttgagattacagacaccttcagcttccctatttcctggcactgggacatctaggaggctcatagcaggtaactgctgagtccctagattggcagcacaggccttgaggctcattcaaaagagtcttgatgatactcaataagtattcatctttgtgactatgtatttaaataaaaatacttaaaccaccaaacagaaattcataaacaacaaaaatgtttagtttccaaaatgtttacaaaatacctaaacaaagaggtaataagacattaagtagaagagcttctaaataataaataatattgaaaactgacccatctatctatcaaatgtgcctgatatcctcttttcatgtgcttctcatagactttcttcaaactcatgaccaaactttgctaatcaaaaatgtatactaacaataataatatcaggctaattttattttcttttgcagttaattactgaaacaacactgatcacaaaagactggtcttgttaatggttgactagaataagatgcatctggaactaagtactttaagttcacgcttttcttaaaccagtaaataagtaggacgagtcatataaaacataaaatacgcatcagtgggccccagtcccagatatctatctagatttccacaggaacagtttctgtttagatttgcactattttgcctttctgaccttgaaaaaataaggaaaaatccagtataaaattcctattttagacaatatgtatgttttggcttattttatactgacctcaggttctgttcaaataatttattaaagatctgttgtatataattattatattttttaatctagctaaaccaggaaagagtagatatgcactcttctgtcttgatttttaaatgaaaatagtatagcgaggaaaaaaaatagcactttcaatgcaataattttttttttcactgaatatgttttttttaattattgttatactttaagttttagggtacatgtgcacaacgtgcaggtttgttacaaatgtatacatgtgtcatgttggtgtgctgcacccattaactcgtcatttagcattagatatatctcctaatgctatccctcccccctccccccaccccacaacagcccccggtgtgtgatgttccccttcctgtgtccatgtgttctcattgttcaattcccaccattttgaagggaagtgttagtagacagtagccaccactctggaaaaacatgagatgaaggagatcactgtaagggcatgagcccaggtcaggaggtttagaaaacgctttggcatccaagttgaccatttaaaacttttccctaagaataagccaagcaaccaaaaaagaatttaattcctagtccaacggaggcattccagttatgttcattaccagccattctcatgtttacaagaaaatgcaagtcatggaaatcctttattgagatctagggttcagttattaggggaagtcatagttatttctgattgttgtcatttttatttttaaattgtttaaattcaatgtacataactttttgaatcatatgggttagttagaaaaaaattaaagaaatttatttgtaaattatacaagagaattgacaggaataatgaataggagatacaagagagcatctgaaaaattttaaactaatggttataacaaaaagaatcgctttttaaactgtaaactatagtgacacaaaaaatatttgttattataacatttatatatagggagagagaaagagaaagtgatagagagacatagtgtgtgtgtgtcattgaatcttccattttcctgaaacactaccctattgagctgtttttacttaacttttattaatcatataatttaattccaatattttgtagaaaaaagggaacaattctgcccaccgccacctcagatacctaatgctcagaatatgacaaccacagtgaattatcaggatggagaaaaagtagctgttctctgtaaagaaaactatctacttccagaagcaaaagaaattgtatgtaaagatggacgatggcaatcattaccacgctgtgttggttagtagtttatttctaagtaatttcacttaaaaagaggttattaatcccctttgctttatctaaagaaagaaacaagaacttatgactaatctgttgcactgtaccccaaagccttaaattgctaagtaaccaattctgtcatttaaaaaagtttctctaagagttatctccaacagtgttcatagaagaaacaagtttgaaatttctacatcttcttaaaaatcttttctatcatatttttactgtaccttttctatgtttaaatatgtttagatatgcaaatacttaccatcatgtcacaatggcctatagtattcagtatggtagcatgctgtacaggtttgtggcctaggacagcaatacccaacctttttagcatcagggacatgttttgtggaagacaatttttccatggactgaggaggttgggggatggtttcaggatgaaactcctgtgcctcagatcatcaggcattagattctcataaggagcatgcaacctaggtcccttgcatgtgcagttcacaatagggttcaagatcctatgagaatctagtgccctggttgatctgacaggaggtagtaatgctggcagtaatgctcattcgcctgcctctcacttcctgtcatgcagcccggttcctaagaggccacagagggtactggtctgcagccaggggtttggggacaataggagcaataggctgcaccatatagcctaggtgtgtagtaggcaacattatctaggtttgtgtaggctcactccatgatgctcacacaaggaaaaaagagcctaatgacacatttctcagaatatcttcttgtcattaagtgctacatggctgcatttcaaaagcacatatttcaaaatattacttgacaaaacatcagatatggcaaagagtgcttagagctggacaagatgcctgataattgaacaatctatttatctaaataaaaaccattggtaattttgcctagagatatttccatagggggtaagtaattgcagtgtgttcaagaaagaatgtggggtgataaagtaagatcatggaggatgagaaacaagtaaatgtgttcaaaagggaatagagaaatgaggcagttaccggatagaagatatggagaaagtgaaattttaccttattgaattgtgacattttcagcatgtttgtaggttggtgaatgattaagtggaaagggagacattgatgttacagaagaaaggagataattcatgaagaaggatcttttacaagtttaaaggtgaaagaatctagtgtcatcatgaagaagtcaatctgagaaagcaaggacagtaactcaatgaaactagaggatgtacaagcaatttgggataggattacttagtgatttcatatttatgttcttggtgatatataaagggagatcagtcagtacaattgaacgtattccagccaatcttagcatgaagttgttactttttttagttttccccaaaatctcttcattagcatgaagttgaaacatttattgatagggaaagatgcctacaatattatttggtatcaaaaaagtaaatgcagaagagtgtgtctgcaattcattttcagtaaaactacaagtttatgatcatatactagttggtatatgctatttgcataaagtaataattaccctgagactagaaacagtaagaaagttatttacttttacctttcctctttaagtgacaattgaatattaaggggtggaggaggaacctagaccagaagtttactcacctgtctctcctgccttcaataaaaagtattcccggtattttatatgaatttcactttaacatgaaaggagctacaatatgttttgaatcagactttatgacagaaatactgtaattaattatttgaatttccagacaccttatattaaagatatgatacatgatgcttcattatattattttgtttaaactaacataatgtctcaacaaataaatgctgttttccagagtctactgcatattgtgggccccctccatctattaacaatggagataccacctcattcccattatcagtatatcctccagggtcaacagtgacgtaccgttgccagtccttctataaactccagggctctgtaactgtaacatgcagaaataaacagtggtcagaaccaccaagatgcctaggtgagttcttaatattctcttggaatctgagatttaatatttatagtgtaatttttttggactaatttcatagaataacccttacttaagtttcattcagtcaaaatctttcctgtcaaatgtaaatacatacaaggaaacatttgaaaaatttgctttatgcaaagtgagaaaaatttatttaaaaactataaataaaattttaaagacctacatgtgataaggtgcattatgaaattctgtagagtccagagctatttatggggcctattcgcactccattaaattgtttcatgttataagcatctacctgagaacttctcacagagaccctttgaaaaacactggtctaggaaaactgtcatttaatactatataaggttctacttgtaaacctgaaagctttccctagtagaacacctagttgactaatactgacatggctttttacttgcatgttggcagaatttctagcaggagagatagaaaatctggaagagttactgagccactttctaaatcttcactatcccttcttttcaccctatttttttctactacaaaataatgccaatatacatattaagtttccacaaattcatgtgcactttgtggcattaaaaaaattaacatcgtagactccttatgaaaatttggagattcacttttagggcttaaaaggagattcttttatcggtcatgacaaactaaaagggacaaaatacaaagatatggggcgaattaataacaccaattatgggaaaagcatgaacgtcagtttactctataataagtggaagaaaactggaatttccataaacccctctgttttctggtgtccaaaagagacaccatggtaataaggatctgttcctgcaacagttctcactgttgcccaatacctcacagggctagaccagaagtttgttatagtcttgaaaattcatccttctgacgatgtctctttcttccaccttctgtagtaacaaattaccccaatgccactatggcctatacagtgcttcaaaccactactctgtgtgagcccctctcccaggatatcattaaaattgtgtgggaactgaactcagaaagtgttgagttagtataaggcagaagtatcatctgaacaattttgctagaatgaagaaaaactaggtttcaaagataacttctaggatttaacttggagtgattgatggatagacaaaaatgccattatctaatattttaagtacagccaagttttagatggtccaataatttaaaattcgcagaaattatcatggccagtgatcataaaataaatttccaaaagaaaagtaagaacaaaatttgtaacctaaaaagtgtgtaccatgttgacaatcagagtttgtgggaagggcattctagcaaaaagaaacagtattttgaacaataacaaacacaaacacacaatcacgaaaacaaacaagcaaaaaaacccatcatagatatctggaaaattcaaggaaacatgatctaactatgaaatgtaaaataattttatttcccatgagataggagattaagattagacagctctgaagaaataattttttccagccaggcatggtggctcacgcctgtattcccagcactttgggaggccaaggcaggaagaatcacctgaggtcgggagttcgagactagcctgaccaatatggagaaaccccatctctactaaaaatacaaaattagacaggcatgggtggcacgtgcctgtaatctcagctactcgggaggctgaggcaggagaatcatttgaacctgggaggtggaggttgcagtgagccgagattgcaccattgcactccagcctgggcaacaagagtgaaactccgtcaaaaaaaaaaaaagatataattttttccaaaaccagacataaatttatttggatggttcatgggtattgaatgaagtagggagccattacatatttttaatagcagttttttgacatagcatctttttttatttttattttttcaagacaaagtcttgctctgtcacccaggctggagcgcagtggcgtgatctcggctcattgcaacctccgcctcctgggttcaagcgattctcctgcctcagcctcccgagtagttgggattacaggcacatgccaccatgcccggctaatttttgtattcttagtagagacagggtttcaccctgttggccaggctggtcttgaactcttgacctcatgatccacccgcctcggcctcccaaagtgctgtgattacaggcgtgagccaccacgcccggcccaatgtagtatttttaaattatcagttgactaagaacatgtggttattttacaccgagaaaacatgcaatatggggaaattgtttaaggccctggcagagatagattagagtcttgactagtaggtaaaaaacaggaaccaaatgaaagaggggttaaagataacttcaaaatttctcgatttatggagaatattctcaggtgcttaacacataagaatttttacaaatcaatcaaaattcagtataaaaattatgtaaggtacataaacagaaaatgaaaaacatatggcaaacatgaaagaatgcttgtctacacgaacataaaatttcagtgaagtgtcaatgttcaactaggagatcggcaaaaagaaaaaagtatataacataaagacttggcaaggatgtggagagttaagcactctaatatacatacaagtgtataattacatatacatgtgtgtatatgtaatataaatatattacatattacatatatttttaacatatatgtatacacatatacatatgtaacatatctaaatatacataagtatgtatgtataatatatgtatacttatatacacatgatacatatacatacaatatatgtatacatataatatacatataatatgttatgtataatatattatattatacattatatataatccatatattatacataatataccgatatatatttatacattagatataaattgattacattacattagatataaattgtatgtaacatgtatacaattaacgtacatatattacaattaacatacatataaatgtatgttatatatacacattatattatgtattatgtattatatattatatataagatatatataaatatatatataaagtgctgattttaagaaagagtgagtgatatctggggtcagggaagaagataacattgttttttctacagaaatcaaggtttcacaaagttaagattcacaaataattacattataaaaagggatatctaaacaaacaacattcatgctggtagaatttttagtaaagtatagcaattaagagctcaggttctgaactcatactggcaggatgcatattctggctcaaaacactcactaaactgtgtagccttgagaaaatctcttagcatttatttcctcatatgtagcccatacacagtgctaagaacagtaccaagaataactcaataaatattattttttaaataaatattaatatttttcatcattttaattccaaaatattcttaaatgcaatttcactattctatgaaaggtaaagatgtattattatttatttattttattttaccatttcttctttcagatccatgtgtggtatctgaagaaaacatgaacaaaaataacatacagttaaaatggagaaacgatggaaaactctatgcaaaaacaggggatgctgttgaattccagtgtaaattcccacataaagcgatgatatcatcaccaccatttcgagcaatctgtcaggaagggaaatttgaatatcctatatgtgaatgaagcaagcataattttcctgaatatattcttcaaacatccatctatgctaaaagtagccattatgtagccaattctgtagttacttcttttattctttcaggtgttgtttaactcagttttatttagaactctggatttttagagctttagaaatttgtaagctgagagaacaatgtttcacttaataggagggtgtcttagtccatattacattgttataacagagtatcacagactggataacttctaaccaatagtttatttgtttcataaatctaaaagctgagaagtccaagatggtggggctgcctctggtgagggtcttctcgaagcatcataatatgctggaaggcatcacaacatggtggaagggatcacgtggcaaaagagcatgtacatgggagtgagagaaaaagagagagagagacagagtggcgggggcggggaggagcgcaaactcatcctttataaagacaccactcctgagataacaatccaatcccatgataatgacattaatccattcaagaagatagagctctcgtgacttaatcaccttctaaagatctcacctgacaacactgttgcattggcagttaagtttccacgtaaactttcggggacacattcaaaccacaggagaaactcaaattgttcctgggcaaatcacaacatggggaattttattcataaatgtccacagaaacagtaaatgttctcgcttcagtacttaattcatctaatccctcctgtttgtctcaaattataggataactttgaaactttctgaattaacgttatttaaaaggaaatgtagatgttattttagtctctatcttcatgttattatcacttaaaaacctgcgaaagctgtcaacttttgtggttgtagcaagtattaataaatatttataaatcctctaatgtaagtctagctacctatccaatactaaataccccttaaagtattaaatgcactatctgctgtaaaagaatagactttgaaatgggttttttttgtttttttttttttgagacggagtctccctctcgcccaggctggagtgcagtggcgcgatctcggctcactgcaagctccgcctcccaagttcacgccattctcctgcctcggcctcccgagtagctgggactacaggcacccgctaccatgcccggctaatttttttgtatttttagtagagacggggtttcatcatgttagccaggatggtctcgatctcctgaccttgtgatccgcccacctcggcctcccaaagtgctgggattacaggcgtgagccaccgcgcccagccaaaagaatagactttgaagttttaaccagtctttctgtggagtttctaatctagtcaagaggtgatgtacatatacaaaaaggtgaaaattattaggttacaaaattgcatatatagaattatctggatgtgtataaatggttatagaagaaagagtgagagaaaaaaaatgatggctttaataattctatgtggtttaggtttaaaaaattaaaatagtctgggcacagtggctcaaacctgtaatcctagaactttagaaggccaaggcaggtggattgcttgaggccaggagttcaagaccagcctgtccaacatggcaaaaccttgtctctaatataatacaaaaaaatagccagacagggtagtgcacacccgcgattccacctacttgggaggctgaggcatgagaaccacttgaacctgggaagcaaaggttgcagcgtgccgagatcatgccactgcactctatcctgggtgacagagcaagactctgtcccagagaaacaaagaaaggaagggaaagagagagagagaagaagaaaaagaaagagagaggaaggaaggaaggagggaaggaaggaagcagggaaagaaggatgggagggaaggaggaagggagggagggaggaatattttcaaattcttcacgttgtcccaaatttcatatttttcattttgaacatatattactttcatattcagaagagagtgatcaaaactgtcactaacgaacaaggcaatagaagatgggtataaagaccatgttggtcatgatgctgatttcatgcaacaactttattatttttttatgtaccatagtttgggaaaatactacacaggaagtattagaaatatactttagatattcctgtatttcacacagcatttcttagttaaaatatttttggtcagaaggtttttttaagtagcctgggacggaggttgcagtgagccaagatggtgccactgcactccagcctgggcaacacagtgagactctgtctcaaaaaacaaaaaaggtttttttaaagtatctattaaaaatatgactactaatacaggtaaaaattaagacttaaaatattcatcaccacagatttgacaatggattcttagatatcacaccaaaaccacaaataagaaaatacaaagtacagaaattggattttctcaaaatttaaaatgtcatgcttcaaaggatactattaaaaaaggaaaatagaactcacacaatgggaaaaaatatttgcaaaattgcatatgtcataaaggacttgtatctagaatatatgtaaggaacttttacaacacagaaaaaaagagaaataagacaatttcaaaataagcaaaggattcaaatagatatttctctaaagaagatatataaattgccattaggcacatgaaaagatgtataacatcattaattattaagtaaatatgaatcaaaaccacagtgagataacacttcacaccctcaaagatgggtgtcatcaagaagtcagataataacaaatgatgtcaaggaagttggaagcaacatacacttctggtggggatattaaatggtttggtcaatttggaaaacaacctgcagtttttaaaaaagttaaacaataggattgccattaactcagcagtctactcctagatacatacccaagataaatttttaaaaatgtgtccacgaaaacacttgtacacatatgtttatggcagcattatttgtgttagccaaaaggaggaaacaatctaaatgctcatcaattgatgaatgggtaaacaaaatgtggtatatctaaacaatggaatattatttgggcatgaaaagggaatgaagtaataatagatgctataacatggatgaaccttgaaaatattctgctaagtgtaggaagccagtcacaaatgaccacatattatgattccatttttatggcatgtccagactaggcaaacctatagagatagaaggtagacctgtggttggttagggttggagctgaggaagagaggttagaagctgatagccaaagtgtacagagtttcttttttgaggcgatattctaaagttgattgtggtaattgttgtaatactctgtgattacactaaaaaaaacattaaattatacccattaagtgggtgaattgtatgttatgtaaattatatctcaaagacattacaaaaaatagtagtcaatgtttaaaattcatgaggatacattggaaatttaaaaactaaaaatgattttaaaatttaggcttagtagcagaatgtagaaaaaattatctggggttgaataaaaaaataagaatttgttacttacactttctatctatctgaaacagctggcttcatgtctaggaagaaggcaggtaacagttttcaattctgagggggaaatcttgaatacaaatattaccaaaaacttaaaaaaagcataaaagtgttttattccaagtacaatcttaaccttattttattttattttattttactttattttattttttatttttgtagtgatgaggccttactatgttacccagggtggtctcaaagtcctggcctcaagccatcctcccacctcagtctcccaaagtgttgggattacaggcaagtgcaccacactgttcctgtaacagtattttaaacttgaacattccctctcagttcctgagaatttttctaagtttttcaagctattctgtgacacattccaaatcaaggtgtttgaacaacaatatagggcttgttgataatgtttgctacctttaccttactacttccctgtataaaggataaaggaagccaaacaagcaaaaggactaaaattagaagttacagaaaatattttcttgcagatatttgtcaggcattgtgagtaccacaaccacttttcttggggaagatgggtagagcttcattccccattccctccagtctaataagaagggcttcaaagagattacttgggtggattaatcaagaaaagattgacaaagtacccctacttggctcacccccctactggaaatctaaatcctttttttacaagagagtaaaatggtatgcaggtgaaaaaaatgaattcctggaaccaaaacataaaatgcaaaggttgataggactataaaatgaaagttgaaatgtttaagcaggttttatgtaaagtagttgtgtatcctttaactaaatgtttcgtggaaatggatattatgcctgactgaggaatgtttcccctacctagtactgtaaaacaggacatataaatccaccctatgagcaatattaactgaacatgctaagtgggagctagtaagattgtccaaggctagagtttagggtgaaagctgagagtgctggtagggatgaatcctccacttgatagccctttgtggaatgttcactaggactgatggcaaaagcctgtgagtgcctcccaacagcgactactagcgctttggaggagagaatttccactttaggggcatttacggcattgctatgggaaaatacccctctgcaagtgaaaacagcagtgcacagaagacttccatgataaaatggaaatgattcttataggatcttgctacttggggagcacaaggaggagattctaagaatcagggagctattttttcctctaggactgactttttcccctgtgattcaattcccacttgacttatggatgacaatttaaaggtgaacaaacgacatcctgtttagaagctgctactctgtttgaaaaagcgtcaagaaaacctttctcttttgagctatttatagcttaccaagcttgagtacagtattttttgcgagcaaaatttaccttctctctatccaagatctccaaaacttggaaactattcataagtattcttcttttagagaaatataattatttccataagttcagtaagaatctgttttattttgtaacaggatataactggagacactagttattttatcaagactttgacttaaatggcatattttcagatatgaccagactgaggaattgaggccaactttatagagccaataaaaagccccttggaaaggctggcctagtaccttgtctaagtgattcccatgcaaggtttctgacttgtagtaagtaaaaacaatgtcactttcaaaaaggcccaggagcctcaggatatttggggaccccaagaggcatggaatttgtacatgtataagaagcacagtctaatggtgagtccttggcttagcttctggccttgaggcttttaaaaagtcaaatctaggccaggcgcggtggctcatgcctgtaatcccagcactttgggaggccgaggcgagcagatgacaaggtcaggagatcgagaccaacctggctaacacagtgaaaccctgtctctactaaatatacaaaaaaattagctgggcatggtggcgggcacctgtagtcccagctactcgggaggctgaggcaggagaatggtatgaacccaggaggcagagcatgcagtgagctgagattgtgccactgcactccagcctgggcaacagagcgagactccatctcacacacacacaaaagaagtcaaatctaaaactccttacaaaagttccagccaaaccaacttaaaagacttctaaatggctgatcgctattcttgctgtacttcatgcaaatgaccagggcaaatataatgagaccaaaatttattttgcaaataaattggcctgctttcatttattattggtagaaatgggaaaactggagagagaaaaatttagattctagccctggcaactgtttctgaatttttattatctgtctacaatctgggctaaatcctgaattatttcctggctgcaacaagtctcaagaagaaccaggttttaattttccttgtgatgctttaagttgactcctttatggaatgggttcttttttgttgttattctggcatacaaattctctctttattgtaatcctctgtgcatagtatttctaccattcaaattattattgttatgtatctctcattgttttacttctttcaagaaaatggaagtcatggtatcctagagatgattcaacagagcctgtgaatctcacccatttgaaatcttactgggccccgactcgtttttcactgccaatacactgctgctaaagctatatagtatcaagcaccttccctaaagtttcagggatcatcttagaagaggagggcgcttgagattgtaagagctggactagatgagtggaatgtggaggccaaagtaactccgtcttagaagctaaactgccttgttggcttctgattaacttcagaagcaacttctgttgctccttgtgtaagagcaggtacttaccatcaatcctgtccttaggtaaaacaaccttgaagttattgtacttcaattgtcctacacatcccttctgaaccacccctcctgtggggtatgtaagccctgagactgagggataatggctcagagatccaccatcttgtctctctgccacttctgacacagacatggctctgttcattaaatctgtattaaatgtttctttctaagaaaaaaaaaagagattacatggaagccttgatatttatttcaccagacctgtctggcttatgactgagagaaattaaagaaaaacataaagagaaacaggcagagaaaatagtcagagacaaaggagagataaattgtcttgaagccaacttaaaagtacattgtccaaaaggcagcatattctaattagaaaaagaagagtcagcaaggcattggaatgcagtgaaagcaccaggttccaaagggctgagttgttttaataactatccacaaatgtatcaccctaacttttcttcttctactatggccccgaaggagttgaaggccataataagttggaggggacagtgagtgggaaaaacttccagggataaaagaagagtccaccatatcccctattcccactacatcttccatttcaggagatcagtgttggagggaaagagaaactttaccttgaaccaaactcagatgtctgattattatattgaattggacttacaaatattttttgtcataaaggtctaatagacaatgttgcagatttcctatggtatcacaccacaaatttctgatgcaaagattgagcctgaataaggttgaggaaggactgagttgtacagtcatgttttttcttctgtctataaaaaaataaactgtgtgctgttgcaagtgaacagagcaaatgtccagttcctgtgatatatttatgtattaacccacattgagttctaaagaacagcaacatggtaaagcctacttttctgtctattatacattttcccaccaacattctgttatgataagtattcatatagaatatttgaacaaacatccccacttaacaattgttgaatcatctaaattcatcaatcattaatgttttaccctatttgctttttcaatggcttcagttatctatccagtaatagaaatctgtctatactttcattgaaccaaatcaaactaagttgctgacattctgacaattcatcgtatcatattccacattttcaaaaatgcattatttaaaatcataagaataggagttcctccatcagtggtgcactgcattattttggcttaaccctcttgttggccgcactacaaatatttgaaaaatatttgtaaaatttgttggaagtcagcagtgcactactgagacatttaagcattacagggccaagacataatagagaaattacctcagcatttagggggcactttttctctcatagcaattgctgatttgaaagtagcagtataaagactaagaagattaacatctatttttccaaaatagagatcttctgcatgaatcttaagccatggtatttacagaagatggagtggaatgccagtttagcaggattatggctccctctgcctttgtggcctaaaccgatgccattgggattgcctttccttttccaggaagagcttccttccttcctttggtcaaagacagaaacttttaaaatgtagcctttcaacatcctcatagtttaggtattcttttggaactcagatattttagtttaatttaaaatttctaacatggatttattttctctcttctttcctcctagtgattgtcttctctctaccaacaaaggtttttccgaggtattccttcaaactccgcgccattacctagtccactgttatcaacaaaatcacagtaatttactaggggctgtgtcatttctgcacaataattttttttcacagaatcacagtatttcctcaagatgtattgtcaaaaattagtcaataatgaatctcatccctcaatttcaatgtataagtaatgcagtttctcttatagaattttatttacatcctaaatccttattcttttgagagagaaactaaatctcaatcaagttgggattaactactatttcagaagctgctaaaaataattccccaatatttgctctctatttcttccttttataaataaaaccctccaagtttctctgcctaggtatatgacacaatagtggaacactgcagtttcctccttttttctaggtccacactggtttgagttctggccaatgccatatgagtggaaataatttgttcccttgtttgtcacagcattaaaaggaatctcgttgcttgtcacttcctctttcctttttccgaaggggtagaacacagatgtactggcggtgagccatctcggatcatgttgataaagcagcccgctgaagaatagtaaagcaataagacagaagatacttgaatccctagctggtatgatccaagcttgtatgatccaaactatgccatgtcagtttctggacccaaatcttaaagactgtggccgcttccacttcctgtctcttggaatacttcctatcagagaaagtccaaacagccctgttgagaggctcatgtgcagtggaactgcagctcctactgtacagcctcagctgatcttccagccaacagccagcaccatcttgctagccatgtgagtcagccatcttaaaaatagatattccggtcctagtcacgtcacctcaactgaaagcttgtggattagagaagcaccatcctgtcaatccctgcccaaatttcaggtttgtgagtaaatttgctttttgttttaagccaatcttataagtttgcagcggtttgttatgcagtaatagatagctagaatgccattaaatacattattaaatgaaaaatgcattgaataattccctgtaaatgttaagaataatgaatacatacttgacaaagagcatcggtagctactttttaatcaaaggacagcttacccttagaatgatgagaattaagaaaaataaggtttagtaacgtcagttacttacgaataattgcaaactccatttatgacatacaaggcccttcttgtttgacttcaaattacttatccaactctaccttccattagtctccaaaaatatgccataaaataattaatattgttctgccagttctctatgctttttcactttgatcatgttattctctctcaaggctcctcctaaattcccacatgcagactgaataattcctgttgacatatgttacactgacagtataactaaatccaaacctgattaaatcccaggaattgatgttatctcccctcgcaatcagaaaaaaatatctgtttagttgcataccaagcagaagacgtggtgattatttatttggtaatgatgatctgagaaaaatcaaatgattgctttagccttggtttttgttttatacccatttattaatattttcttttgctttcgagactaatgtatagtttaaaagtcttagagcaaaaattatgtatcaaaaaaatttatcaaataaaactgttgcaagtatgcttctttgcagagcaaatggtaacctgtaatttcaggatattgttcatatccatcagtttggatttttgttggtgttttataaaaggcacttgatttttgtcattctttttttttttttttttttttctgcaagacaagagtctcactctgtcgcccaggcttgagtgcaatggcacgatcttggctcactgcaacctccacctcccacgttcaagcaattcttctgtctcagcctcctgagcagctggaaccacaggcatgcaccaccacacctggctaagtttttgtatttttagtagagaagggggtttcaccatgttggccaggctagtcttgaactcctgacctcaggtgatctgcccatgtctgcctcccaaaatgctaggactacaggtgtgagccacagtgcctggcccagttgttgtcattctttattccctaagaaatatttctttttaaaagacatagaaataaaatgagataaaatacaaaacttaagttggtattagacagagataataatctaccttaaatatcccttgatttaatttttttagatttttacatatataatacaaaagaggagacaagatattttagactagaaagaacaagatgacatatgataagttataaagtattttatgtggggaaatattattgaattttattaattagtaaaatacatattttttctctcaattattttattggcagtgacttaacctcttttaacat

SEQ ID NO: 387 - DNA, 22008 bp, Homo sapiens
gaggcagcacaggagggtgggttctccaccacacacccttcgctctgcttagccttatgcctaccagccatcagttagcattcctcctcaacagctgcttccaagaacaggatggaagaatatatttggagtaaagagatgaaccagatgtggaggtaaaagtatctactacttgtgttcacacattactgatatccacctctccacccccacccctcaaaagggtgtagcaattcctcacgtgatggactatgactatatcacatattagatccttccctgtccctccaccttcctcatctgttgcaattcaggttttttgggtggaggagtagaagccagctaaggttgcctgacttctattacaaatttgttccagagctggggtaaggggagagtctattttcaacacccagcccagaactaagttttaccccacatcacctccatcatggggcacatgggacagaagagcttactgactgctaagggtagctcaggaagatggccagatgaggcaggctgccaggattccaagagcaggagttctggtgcactgaagaaaaagcaattaaatcacaacagagtcagatgtgtgttattaactttttattttgaattgattatgggttgacaggaagttacaaaaaatggtacagagggggctcgtgtgcccttcacccagtttcccccaatggttacatcttacatactcagatgtggttttagaaatttatgttcgattagagccgggcctgcctcattcgctgcctggtcaggggcagactctggagtctgggggatttgggaggagcttctggaagagaagggaagcaggaacctctggggaatgggtgagagaagataccttgaaatgccagtgagccaaggtaagaagactggaagaaaaagaggttggaaaaaggaaggcagggtgactacggttgttgggagtgtgggggagacagtcctaggctccatggtaagaggaagcaggagaggacagttatatgaagggagaaaccatgatttcacagagagaagcaggctggaaactgggggttgtggggaagtgaggctaacatgagtctgagggcctcagggaggttcctatagctagccatatcccctgagtaggtgggtgagtggagggaattataagggaactgggggaggctgacatgagaaggctggtggggatggggaggtgagactcggagctggtgcctgttgccatggtgtgagctgaggccctgggcctccatccaggacttaggatctggcccagtgggtggacagtcactgccaactggacacagtcaacttcttgggtgggttttactgtctctgggagaggaaggatgatgaggaggtgggggcgaagagggggtaaacaagctggaaagaacctagaagatagcaccactttgcatggtgatcaaagccctggacattttcgcacccacctggtctcttgggaggggaccctgcctgcctcgtaagtcaggaaggaagtcttgttacagggatcagagtgttggaaatggagacagctggcctgtggtggtagaggttggggagtggctcaggaattaaattcccgaatagagaccagcgatacctattggatcagcttcatacttgcgggagcagagtaggtagagcttctggttggttagggtgctattgtagtagcagctagtgggtggctgttggtggctcagggagcagaccgtgatggggagggaatcctgggtgagtgtgcagtattcattgtaattctcacagaagctgtcactatacttgcagaacttctggatggccttccaaggggcatgtatcacataatggatctttgggcaatctgaattttgcatcttgcctcgcatataggacatcagaccattacaatagccccggaaaccctttgggtagttaaccctgggatagtcaatgcttaaggtatagaagttcctgctgccaatctgcatcttgatgtccatgaccagagttggccccagaacaagctggaggaaaaggagccgggtcacagctggtgccattcctcctgctggtagagttaaggtggttgggggcagcagtgggcctgaagtggctgtctgccacatcccagagcctccagcattcccaacccaacagtactttagagatcatctcacccataaccaagttctcatgacccagaaagaggagatgcttgcccaaggccacccagacaaccagccaccttcagccagccctgctcccctggtccaccacagaatctcagcctctgcagagtccgtgagctacatttgcagaataagagctctaactggtccttgggtgagagactcttcccaagagtccttgggcccctggcactcctgctagtaaaaaatgcagagaagaaagaaggagcaggctgacctgacaattctctggcagctgggaggaaggacaggagctgaagatagctgggtagggacgtgtattcttcttgccaaggccaagacagtcaagagatgaggagaggctagaaaggtttctaggtaaaaatcagtctgggaggagggaatgtccccgagtttgatgagcccctgtgctaagagggttggatgggtgggaggaaagaggcattactatctggtctcctcctctacagtgtcattggaacacttacttccaatctccttgccaaaagttcctaagtgcctgggctttctttgatgttttctctgttccatagcctgtgctctcgtggcaaggtgagtaggaaagcactgttatgtttctgaggaacaaagtgcttcttattcctgaccctcagagaacagagcattcgccactttgtcatcccactcacgggagcccaggagggcatgtactcaggggcctcccaccaaagtgctgggctgagaatcaaagacctccatgtggactccccacggtccctatcagccttactcctgtcacacccacagccttcacctgtgacctcaggccctgtcagagtttgagcactactggaaatctctgcatgctgactctgaagcctcaaacttggcagtttggatttgaaagcataacctgaacatgaaaagctgtggatgccagagcctggcatgatccgtttcgtactgttggttgatctctgagtggtttgccatgctggggaaagggccacgctcctatctttttcatcaacatcttccctttcatcagaatcaaagagccagctccctggaaactgctagctcttgcccttgacttccacaggtcactcagccttgttagtctgcaaggtgtcttccagatttggggcctcctcttaggagagcctttttacctttgctgggcagcagaaaaggggagtcagaacacagaaagctgagtgctccaacaccctcagtatagctcaggaggagggagtaaggccgcagagagaaagattggtgttcctcatgtagagccccctaaactggcactttctgacagcacaaaccacagtccaaaatggaatccatcctccccataacttgtttctcttcctgttttgtcaactcagtttccctggttacctatgcaagaaacctgaaagtgatcctagacccctccacctccccaatcccagctacggggaggcggtcctgcatggtggttaagatcaaggcttttgagtgaaacagaccaggaattgaatcctgcctctgcagcttacaaactgcacaccatctatctgtttacgaaaccactgaaagcttccttgtttcatctgttcatgaggatagtattttttacctcacggcagtatgaggatccattaagatgtatatcaagagtttttagaccagtgcccggcacatggtgagtcctcagtatgagcctgagtccatcagtcacacagccctgacaatcttaaacttttcccaagcccatctcttccattcttatttcttcctcagtggatgctctcgtctcgcctggacagcacacacactccaactccagtaagactcaactcaaatatatctcttatacaacttcaagagaaaaagtgtgatcccttctttcgtctaaaagtctgcaatagcttgtttctcatagggtaggggtgcccagtcttttggcttccctgggccacattggaagaagaattgtcttgggccgcacataaaatacactatcactaacgatagctgatgagcttaaaacatgcaaaaaaattcataatgttttaagaaagtttacgaatttgtgttgggctgcattcaaagccatcctgggccacatgtgacccgcgggccatgggttggacaagcttgtcgtagggtatagtccaaactacatctcacaggacataagacttcccatgatcttgcacctgcccatgtgtacaactgcatctgcatccctgcctgcttcccaccttgtcccccacctcctctatgccctatctgctgctgtctcctctacctggaaccctgctgctgcaccgttcctcgcccccatctattccatggtgctagctcatagaaagactcaacccagaggtcccacttagaaagcctctgctgggaagacctcgccaaggaagtgggcaccgtcaagcaagtgaggatagagcccacatgggcaggtggctcatctgtattcttcaggctgctcaacaagacaacactgagcgggtgccaatgcagggtgtcgcctgagcctggctgactcaggcctttgctttgaggaagccaaccacattgtggtccctgccttgaatcatgccacctcttccctggtccctcaaggctgcagcttccctgagaatagaaagggactttttataccttttgttcttcctcttccttcattccccagccacccatcaccgctcttcgctccccccacccaacaccactcacttctgccgcacaattacagaaactgaacagcacattatagaggaaagcattcaggacttaaatgatttaatgatgatgagccttcggcttcccaactgcaatcctggtgatctgttccctaaaatcctgtcctagaggtgctgatgcataagattacttcatccattctgacaacctcatcatggtgtcatgtgctccgtaagcctgagattagtgggattgttaccccattacaccgggttttacatacacaagcatttccctagggatgaaaaactaagttctagagtgacagtggcttgctcaaggtcatatgtctaattcagtagttccagggacaattggataatgtctggagacatttttggttgtcacaaccaggagttgctactggcctgtggccagggatattgctgaacatcccacatttcacaggacagctcccataacaaagaattatccagaccaagatgtaaataacactgaggttgtgaagccctggtctaaataattagctaatcaaatttcttaaccaaagcagacttacttgtatcttatgtattaaaaaaatgataaacatctgggacatcaaaatatttttgttaaacaaatgttgattgtaatggtgctgattctaccagaaaaatgtgtattgatagttcaccattgaaacaataactgagttgtttttcctgtaaagatgaccctctgcatgtaatcatttacacattctctcccttccctccccaatggtaagcatttatagaacaactggctagggtggcaggtgcaagggtgactccctatgactgaggagaaccccaaaattttgctctgagtgggctcaccatgatctcattggcattatcttttgccctgtccaattcaagttgctcaaacaatatactgtgtcatggacagttcctgggctgtccttgaacctgaaggattgcctcagccatctcaaccttcttctcatagcatcacctcaaacccagggctgaagtctagaagccgcattgtcacttcctcatctgttaaccatctctgtgggctggaggcaatcccacctcagactgggatcattcaggagcagacggaatgccttctaaaagttgaatcagttagggtcacttatatgcaaggcattatgctatatactgtgaaatgtgcaaaagaaatgtaacgggtggtcctcatcttgtgggaattgacagtctaagagaaaaataatacatacacatgaagaaataaccagtgattcaaggcagaaaattatacattctgaagacagtaaatgctgtaggaatttagaggtgagaaagatgtctctgaattgggagggtcagagaaagttttcctgaagggtcaccctggcttggaaatggatctcatggtgaagttagaagttcagtggagataaagaggattatgaaagacatgcttgaaaaatggggggaaaccggtctggctggggttgaggcactcagtgggagaaaaatcagagataaagttagaaagacaggtttgcccgattgtgacagaccctgattaccaggctaaggaaatgatactttgctctgtagataaatggggagctgggagggcttgtgagacaaggccccagtgaacccccaaatcagtttcctctttcctccatcctggcttgtctaaacgcattggtctgggagccaaggattccaaatttctgtcagtgctgcctcctcctgacccacagctgttccaggaaaggtcatgggaattcaaggacctgaagaaagtcccacatctgacctcaacttgctgtatgtttcactttctcagtctacaaaaatgagcccattacctttatttatcaaaggaccaacaaaattaggataacagaacttggatctgcttttgcttggaagggaactctcacgggctttccattggtatccagaggctgtgtggaactccggaaggcagagaggcttggctctgaagggtaggcaccaatccaggcccggccctcctctctcccttcccccttcactccctcccagcacaggcgagaggaagcagcagctgttgtcctgtggggaagacaggcagaggtccacctggcactgttgggattttcacaacacccgccccaacttaaacacacacacaacagcctaaggagaagctgggccaacagaagtgacttcgacgatagaatgagaaggaagcaggggtagagattgctggtgtaagggactttttcttcccttctgtcttctctcccactgttttgtcttctgctcttgctctctctctcagagtctttcttctcctcctgtgaaactcctgaaccagtccctggcctgatgcctgaatctttttgttcttcctaaacttgtcccccttcctccatctttttctgttgccccatgaatgcagtgaagccaaaatagcaaaatcagcctaccaagtacaaggtgaagcagatcttggaagctggataatttgggcacacaaacaaaatcacctcccttatccaaataattgaggcaaaacaaagatttcagttgaattgcacgtatggtaggtacgactcaatttcgattttcatgtgcaaacttaaaaccttactctcttttccctttggactgaagcagcagggccatgtttatttcactttcacacagtcctaaggcagccttctacgcagcccagcatactcgagttgaagagcaaactaggataattataatatcaggaaaacacaagtgtagagggaaatttaaatcatggcttgaaaacatcccactctaggataatgagaagtagaaaggagaccaagctaggcattcaaatgagcttgcagccttccatccagcctccactccaaaggctagactggcctgtgctgatacacatttgatacacagcctggtttaaaccgtggattttatctcctaacattcatgtttctacggcagcaggggcataattctctatccagaacttctatccagaagttcagcctgcaaagtttgggataccttaacaaagaagtgaacagctgctcccccaaccaaggcctcgctgaggacaaaccagaagagccagaggcctgtgtgaacttgttcttgattctcttttgccatctagtggcatttctcatctccagcaccacttttgcttctaaagatccttcatcctgacccccaacccacagctgtgctgtccagctactaaaataatgtcctcctggcctcaaaacaaactccccatcctcctgacttagaatcataaattctggaccagaacacaaactttatgatcaggatgggttgtgcgacttctccacagttataatccacacaacagccaggtaatcctttaagctgacacgttctttattcatctacttagaacccttccagggttccctactgtgcttggagtaaaagccacaggccttcaaatggtccgtaagtcttcccaatgacctggtctctggtccctctctgaactctcagttacctgctccagccacactggacacactgctgttcctccaacacctcaggcatctgtctgctctggggcttttgcagtgctagtctcttcacttggaacattcttcctccggataatcacaagttcactcttatcttcaagtctctgccccagagtcagcgatttcaacgatgttacgtaaaattactgaccaccaacccctatactgttctacttttttccctagccattatcactttgagcaaagtatacgtatttttttttactgtctttctccaatggaatgtaagctctacaaaggcagggacttttgtctttgttttttgttgttgtttgtttgtttgtttgtttgttttttgagacagggtctcactctgtgacccaggctggagtgcagtggtgcaatcatgattttcactgcagattttatctctcaagctcaagcaatcctccctcctcagcctctggagtagctgggaccacaggcatgcaccaccatgcctggctaatttttcaaattttttatagagacagggtttcgccacattgcccaggctggtcttgaattcgtggccttaggcaatcctcctgccatggcctcccaaagtgctaggattacaggtgtgggccaccgtacctggccatttttgccttttttgttcagtgatatatcccaagtatcttgacacttagtagatgctcgataaatgtttgttgaccacatgaatgaagcatgcccaagattctgagattgcctactacttacaggtaaattctgaaaacaaaaatattcctcatctcagttttacaggccttctcacccacagagggtgatgcttctctgccttggtgtctcggttctcctgagtgtcatattccaagctcacaagagcttggagtagcactgacccagatgctccacacagctgtaaccaccacaaggaacaggacatacaaggtgaaggaagcactaaggcaggatgtcgagagcagcaacagcattttaaacacaaacatttgggcagtattaaatttttgcaattttcaataaaaaagggagggaacaagtgaaattgagaggtgttggctgccttctccagctaaagccatgtggccttggttggtacctggaactggagaggcctgtgaatcattgtggaatggcttcgctattggggatggtgccaggcctcgtgacagtgatgattcattcacccacttccctcgtgtctgttccatctcctccgaaagataaccagtatctccagatgacaaggaaccagacaaagcatctttctaggctgtcctatctgtgcctcaggtcagagaagaagcaacccttaacaccacagtgattgactcttcccaggatcaagggccagaagtgtatatgagaggatatgaatgacaactcttcctgaaattgatttcagttgacacctgggtcaggtgctctattaaagagtcattaaaatcatgtggccagggaacaaatacagtcttcgaatgtgacgattcaagcttcctcattgctgaacatgtttaggcaggtacaggcatccttaggtgtccacgtatttgggacatgtaagtggagaggcatgaacctgattcatttcctgatccagtgatgctcccagcccacccccaaacagacacagcgtagcccgggccagctcttaaggagttcaggagtgagaagaggccctcagagatctgacagcctaggagtgcgtggacaccacctcagcccactgagcaggagtcacagcacgaagaccaagcgcaaaggtgaggctgtggcaggatctggggaggagtgaggacagagaaggagggatgggttctgatcctgagagtacactcaggtgagcgataaaatggataaaggagggactggatttaggggagatgaggacacgcattggggaaaggggagagtgatgttggggatggaggcaaaaaatgaaaaagaatgggaacacagacgagatgggaatcgggagaggatgagacacagacacaggaacatggagacacaaaagggatgagacttaagggaaaggggagaggacaaagagtgacaggcaacagggacagaatgaagggaacagaaatacaagatgagagatggggccacagggttgttgttggggctgcagtggatgtggacacacagaagaagaggcagagatgagacacaaagtgaggaaaggagacaaccgagtagggagatgggtgactagctcatatgagcaggtataagaggactaatttctcaactgaacacctctgtcccagcgacccctgccctccatcctgactgctcctcctaagagagatggcaccggccagagcaggattctgcccccttctgctgcttctgctgctggggctgtgggtggcagagatcccagtcagtgccaagcccaagggcatgacctcatcacagtggtttaaaattcagcacatgcagcccagccctcaagcatgcaactcagccatgaaaaacattaacaagcacacaaaacggtgcaaagacctcaacaccttcctgcacgagcctttctccagtgtggccgccacctgccagacccccaaaatagcctgcaagaatggcgataaaaactgccaccagagccacggggccgtgtccctgaccatgtgtaagctcacctcagggaagcatccgaactgcaggtacaaagagaagcgacagaacaagtcttacgtagtggcctgtaagcctccccagaaaaaggactctcagcaattccacctggttcctgtacacttggacagagtcctttaggtttccagactggcttgctctttggctgaccttcaattccctctccaggactccgcaccactcccctacacccagagcattctcttcccctcatctcttggggctgttcctggttcagcctctgctgggaggctgaagctgacactctggtgagctgagctctagagggatggcttttcatctttttgttgctgttttcccagatgcttatccccaagaaacagcaagctcaggtctgtgggttccctggtctatgccattgcacatgtctcccctgccccctggcattagggcagcatgacaaggagaggaaataaatggaaagggggcatatgggatttgtggacacagctgtttctgttcctgaactagaagtcttccccagctctgacgtggcagtgaggtgacctgaaggaaagaaaaatataaataaataccacttcatatttgtatagaatcctctaatcccttgtgacatagacttgacagggattgtatgccttctttatggatgaggaaattaaggttttagaaagcttaatgaattaaagagcttgtctaattagttagtagcagaacctggacttgaacctaggtctccttgctctaaatacagtgtaccttctactctaccagttgcgcaagaaagaagtcactgttacagaggcaagcggtgaactaggtaagagttcactcatgaagaaacgagtgctctgaagagccagttaccctgtgttggctgcaataaaggtcattacctctctagccaagagattgtttatgaggtgctctggcattttattccttctctctcttcctctctaactgcccctcccgtttctctagaccactgctcttccaacctaggccctggacctggctctggccagatccccttggcctgaagacataaggtaaagggagtgtctgagcttcatcccccagatccaggatcacatttcctttgaccttaagggacttccgtggccctgagcctgcttgtcacaaacaggctggtgggagctgccagagcttccttcctcctgataatgatctcccctgcctcattgctaccctggctctccactctggcagtctgcccaggcctgaggggttgagatgcgaaaatgccatttccctgtccccctgggctacagataccatttctctcgttctggggactggagctggagaaggtatggcttggtattggccagtcctgatggtctctccaacattgcttgaccagcaccatccccttctttcttcctttatctcagtcccaaacaagctgcattgtgtcccatgcctgttctatttcaaacccaaattcattataagacattcccaaccctgctgaggattccactctacctatccctccccatcaactcctgtgcttttttactactgaccagagtcagagtaagctttggagccagacagaatcaggtgtaaatcctgactcccgtctacatgacctcgaacaattggcttgtctgtttctctacagcaaaatgtgaggaatcctacctgccaaataggattccaggtaaagatgtggaaatgctatctatgaaacgcttgtcagccccaagtactgacaggtgttagatcataactagtagtagcaatatccatctttggaaaacacgcagaccaaggcaaatacccccactaaggtctcccgagagacttccttctgccagagtgatgatcatgagtgggttagaggacaagcccgcaggcagagtcctgggagggcagccaggttgtctgagatgatgaggagagaaagtaaggaaaggatgattaaaggaaaggagagcagatcattaaacagttctaacagaatgagggccaataagtggatgagttggtcacaacagccaaacgactgagtgtaaaaacaaatgttacctgaaaacagaacattgccatcatcgaatggacttctgggattcttgaataaatctgaagtttatccaaaatctgaatttgttttgaactcttgtggtcagtatactacatttaccatcctaaagagatgattttcacttgtggtgcacagaaaagcaagatacttggggcagccgatttttctcttcattttattcttttttcacaactctatcttctttattgatgatctttcttatggataatatggttttagagacattctcctcacaaaatttaaagtggctaaaattatgccttcaatgcatcctcccaaaataagaagaatttccaactaaaactttttcttgaaacttgacctaatatagcattaaaagttgacctaaatagcattaaataactagaaagttctgaagtaacctgtggtgatacaggtcagaatagttgtagccttggggaagtataactgtgaaggggcatgggggagccttctgaggacctggaaatattctattcttggtctggatatgtttcctatgtgaaagctcattgaactgtatacttaagatttgtttcaaaaggcagcaggtggtcataaaaataaataagaaaaaaagatttgtgtattttatgtaagttatatctcattttcaaaaaagtctttcaaatatgtatacttcttaagggattattttatttacataataaatcataatacaccaatcaattctaaaaagagtaattaaatcatagatagaattatgatataatctaatttctattgttctgttctgtactatttgttaaattaaatactacttgtggtgtttattaaattgttgtaaatacattgggctcagccaggcacagtggctctcacttgtaatcccagcactttgggaggcctaaccagagcagcttacttgagcccaggagtttgagaccagtctgggcaacatagtgaaaccccatatctacaaaaaatacaattagctgggtatgatgacacatgcctgtagtccctgctactccagaggctgaggtggcggatctcttgagcccagaaggttgaggctgcagtgagccatgatctgcactccagcctgggcaccactgcactccagcctgagtaacagaatgagagcctgtctcaaaacaaatacatacatacatacatacatacatacatacatacatacatacatacataccttggtctcagaaagtacagttggcttttgaacaacatggaggttaagggtgcctagtgtacagtcgaaaatccaagtataacctttgactcccccaaaacttaactactaatagcctattgatcacctgaagccttaccaataacataaacgttcagttaacatatattttgtatgctatatgtattatgtaccatattcctacaataaagtaagctagagaaaaaaaaggtgtcattaagaaaatcataaggaagaaaaaaatatttactattcgtttagtggaagtggctcatcataaaagtcttcatcctcattgtcttcacgttaaggaggctgaggaggagaaggaagaggaggggttggtcttgctgtctcagggatggcagaagcagatgaaaatttgaatgtaagtggacttgcacagttcaaatcattgttgatcaagggacataaggttctccctaaagttatctagctaacacactctcttctattatttatattatcggtcaactaatttcctattttttaaccatgtggaaattttaaataattgtttcatatataagctttcacaacaattaataatagcatctttcttaaaaataataaataataataaatacccatttatacttccactggctggtagaatttcaatataataatttttttttaagctcacaaggaaaatttcactccaggttacatctagagtactcaccaatatttggaagtaactattcagatattaacaataaatccaaatggcctggcctattcttattagtggtgccctacctgaatagatttgtcactcaatccttcgtgtgaccttgatcacagccaagttaaaggatgccaggaatagtgatgaaataggaatttgactattcagccttccaaaagccaaagctgagatacaagaagataataatttgggccaaataccaaggctggctgaactgtgatgcattcctacttgaaagctgaagaatgggaaaaggagaatgcttaattatgagatatttatgtttctagggctgggagcttggagagaggaggatggtgtccaggggagctttgcccagtcttgtgcagatggacttaaattgtttcaacatggagtaaaggagcggaaatggagttcagtaaagaaagtaaaccaagaactggagctagatgagctggctctcctagaagggagactatctgaggtagactggggaggagacttttctacatgactctggttcccagaagtctccacacactgaagtaaatgagccctagacaccatgaagagggccaacagaatcactgtgaagagaaggatcctcagctccagggatttcctctgcctacaccctgcccttaagatcaggaccctttggccctcttcatagtgtctggggctctgggggataacccttgagctatggcaccaaaaaacataccagtagcaacaacatccagggggccttctcttctccttgggagagcttcaactcatttcatcacatttcttccatgcacctgcacaactgggcttccaaaagtgcttcaaagacttcagagcttcattctaatgtcctccccctacccccaccccaccatgaatgggcaaaaagaagagcagttatagctcttatcaggatgcttacctgtgcaagactccaaaaccagtaagcttgggaacatccacggagccacagggacatgagaaagcccacattgctaatgagatcttgtaagaagtccacagttcataagaggaaaggtaaataaaaatgtgtgctcgtgatgaaaatacacactgtgatagaacgcctcttagcttagggaggtgggagtttccccatctatataagctgatctcaaactcctgagctcaggtgatctactctcctcagcctcccaaaactgctgagattacaggtgtgagccaatgcgcctggcaataatgttaccaacagatggtttttgggcttgaataccttcagggacatggatcttcactaccacttcacaagagtataatgtggattaaaagtaacaatacatataaagcacttagtacagtgactagcatgtagggaaagtttgaatggtgttagcatttctatttatcattgtggtgtcaaatgttgagtggtcaaacctgtgatgaatggagcaggcctgacttccgtgacagaagaacaaaggatttaaacaagggaggccaaactcctcctcatccgcctcttgccaaaaagctcctagccaagagtagataagggaaggttcaaggtcagacaaaaaggacaatatgtattagtttctgtagataaggttatttgggaggaatggatgggtactttgagttgaaggagaagtaaaagggggctttggagaatttctgttaagattacttaagggaagtttttctcctctgcaacctctgtgaatttatgaatccaaagatatgaaaataagttggaggacttaggaccactaacttttgagggtgccctctgtattccctcccatccaaaggatttgattattgcagcaattgatggagacagggctctagtgacatttccaacttcccctcctgagatatttaaattagtccttaggaaggcttactatcccctcacttccatcgtggaagcctcttatatttttcccaccctctgattcagctccattttctggttcatttttcatcactcaaaacctccaccaacgcctgtgactcatgtccagtggattggttatagcagaaaaacattgtggtcattactttctatggttttttcatagaaacttagttgaacttacacatttaaaacataaactaactgtggtgtgaattagtacaaattcctgcttgggtcgtggcatttagcacaagatgaaatttcctatctccatggctttagggctctcccagtagtaatcataacattataatgctgcaagacatcttgtccagtgttctcggagatcatctagtcatgccttcctcatgttgcaaatgagcaaaataaccctgaggacttaaacactttgcccaagattacatgaataatttaggcaagaactcgggcttttttgaacaagccttgtgatatttacaaagtggcattcaatatcaaatggatctcagacatctttcttcttttttttttttttttgagatagagtcttgctctgtcacccaggctagagtgcagtggcacgatctcgactcattgcaaccttgttgagctttttggcctcccaggttcaagcgattcacctacctcagcctcctgagtagctgagattacaggtatgcaccaccatgcccggctaatttttgtatttttagtaaagactgggtttcaccatgttggtcaggctgctcttgaactcctgacctcatgttctgcctgccttggcctcccaaagtgttgggattacaggtgagccactgtgcccagcccagatatctttcaagatcaaatcatacatggactggcaaatcaatctgcaaatgggcagacccccggatttgagacaaaagcatgttcatccaaaagagtattaagtgcccgtaatcctgacacgttgcatttctgaccttcacctgaatgctcatattgtatcattgagatgggaaaaaaacagtacatgaggaattgatggcaaactagtcaagcatgtccctggccgtgccattggctgctggaaacataaataaggatatgcaacaagaaaaagggcctggacctcccatctgctactccggaccagggtgaaaacattacagagatcctgtttggtggagctccgggtgggcctgagatatcccaagcatttatctttggtaagggttaccactttttacccttgaatttggcatatccagaacaggatcttcatggtcaactagaacctgcagagcaatgcttcccagaatttcccctgaagtgctagtaaccacagaggaagatgaactaaaacacctaaagtagtgcccaatgagcttgggctttctctgaagcttctttcacttaactaatatttataaaatagccgtgcatatgagtgttttatatgctatctttaaatttcatttgtggtaataataataatggatcaatgtcaatttcccctttttggtggctgtactgtggttatgcacacgagagtacttgtaattaggaaatagtcactgaagtattaaggggtaatgagcatcatgtctgtaacttgttctgaaatagctcagaaatgttaataattggggaactgggtgaagcatataggggagctctgtgtatgctttctgaaacttttatatacgttttaaattatttcaaagtgaaaatgctaaaaaaatttaatgtaactcatttgaatttttctatcatacaaagttattttctgtaaaaataatgccttaaattactccccatcccctaaaaagatggttttagtaaaattgtaaagaacacatttatcttgtgactttgtgtaccctctgcacacatctgtgttccacctggggtagcagtacactggctctaatgttttccttaacttgctctttgtggatttctgtctctgaccagtgtttcttttcaagaactggttgaggaagatagggtagtcatggggctagggcattggaaaggtccttttcatgctgaaaaatgagaaaatagacatagagcacttggaacagtgactggaacatagaaaagcctcagtaaatgttaactatgattgtttttatcgttatgacccctatcattcctagcagggctgaaggctgcacgcagccttgttgtggtaagtcagaggtctcaggagggcagccggcctatgaggggaactggcgtatccagggagccatatgcctcagctctggttgggttgaagactacatcctctccctcatgaagatgaatccaggagtgaggaacaaagggagacagtcctcccgcagagacaagctcatagtgcaaatgggcaccataggaaggcctcaaagaactacatagaaaagaaaaatggacctggcaggagacagggttagccactggaaacagaggagggcttcccaaaaggaatgtggccactggattccatgtgatggagctctgcttctcagagccataaaccagggcccagaccacaggtctgtcaccaccaggaggctgtttgaaggttgaagcttgaaaaaccctatgggggtggcacttgtagttcaaagacgaccctcgtggtactgctgtccttcaggccagcaaaccaggcaaacttctctggcaccctcgctcagccctcctggggtatcctgaaagaatgggtctttgggagatagttgcttattctctgctccccttctttcaaggcaccttcagagtctactattaggcctctccttcatactagtaaggtgctggctacttactagcactttgatgttttttcttgtgtcacacaagtgtcagaaccagggggcattttagacattattcaactgaaactccttgtgttataaatagtaagaagactgagaggatcagagtgatgactgagttcaatgcacggttactgagtgctcctgtgagctagccatgtgcctggcactatgaagacagagaagcacggaaggacctgattcctgtcccacgagtttaccgtctagttgggaagactggatgctcttactggatgaaagagttaaatagcaaaacaaggtagtacacgatttagaacccaaatgagtgatactatgaaacagttaatgctaaaggaggttaggatttgtacggcaaggttcgtaaatgtgatcctgagcaaactcatatggtcaagatgagttctaaaggatggataatatttgagggaggacttgcagggaagagggaaacagaagcaaagctgaagagagcaaaacatgtgctggagacaaaaggaaaatcaggttattaggatagaatttggttagaatagtttgtgttcggagggaagatagggaggccactcatacggaatgggtagactggacgcaaggtgagtaggagaaggctttgattccaggctgggaaggctggatgttaccttgcaagcaagagaaccactggagataaacagatgatctttagagaaatgatgcaggaaaaggaatattttaacaagatccatccaacattattatacatgctcaattaaactcaggagaaagggtaggcaaggaggcagttagaaggtggtgagagtcatccagacaggcagtggaaagggagagaaatacgtacaagagaaccaataagactaagtgactcaagtgcccctccatactttgatcatgctaagtattcagtctgttagcctactaatcgatatggggatgaaagattagaaacagtcaaaggagaccagtattttcaactggaagcgccaaaaacagaaacaggggccttacaaggggataatcaggttttgagaaaagttgaattctcagacaacagaactgggtgcctgatataactggtaggtagtgaagattcatgtcactgaaggtattcaagcccaaaaaccatctgttggtaacgttattgccaggtgcattggctcacacctgtaatatcagtactttgggaggctgaggcgagtggatcacttgagtccaggagtttgagaccagtgctggcaacgtggcaaaacccatctctacaaaaaatagaaaaattagccgcactttggccgggcgcagtggctgacacctgtcatcccagcacttggggaggccgaggcaggtggctcatgaggtcaggagttcgagaccagcctggccaagatggtgaaaccccagctctactaaaaaatacaaaaattagccaggcgcggcagtgggtgtctgtaatcccagctactcaagaggctgaggcaggagaatcgcttgaacccaggaggcagagtttgcagtgagccgagatctcgccactgcagtctagcctgggcggcagagcaagactccgtctcagaaaaaaaaagaaaagaaaaagaaaaattagccacacgtggtggtgcaggcctgtagtcccagctactcaggaggctgacgtaggaggaccacctgatcccaggatgtagaaactacagggagccatgatcgtgccactgcactccagcctgggtgacagagcaagaccctgccttaaaaaagaaaaaaaaaatacacttctgatcagagcaagagctaagattcaatgaactcggaagtgccttcctgctttgatattctatgaaactgggtccatgtaagctagtgaagagccttgcccaaggtcatgcagctaattagtgaaagaggtgggaccagaattcagggctattcatgtctggttcagtattcttaccactagactattttaactttgattgtagtctgagttgtactctcaggggtgaccagaaaccccatataaaaacaagatcagtaaaaattggctctgaaatgaaacaaagctgcagcacggcctgacacagtgtacagagtgtaaatttgaggatcagatcgaagtggctctgtcactcactcctgtatggctgtgggcaagttactcaactcccacacacacagacattg

SEQ ID NO: 388 - DNA, 84081 bp, Homo sapiens
ggtgattctgtctatcttgaaaagacacctatatgaagactctctccaacctcattggaaggtcccataccaagaccttctcaccaatccctgtatcaccaaactcaaaggcattgactcattgatccacatctctcattttaaaagggcttctacttctgcctggaccggtaccccagcaggcaatttaaagtttatctgttatctgaagcagacaacaattgaaataaactgctattcacaagacgtccagaccaggccaatatacccttttccttttactattggtctcttcttatgtgcttttattttcctggaaaaataaggctctaatttgcattttctaatctatttccaaaatgagaaacataaccgatttattggatttggtaccaaaaaaacttcaatctccatgatgcaagtgaacccctggtctaactcataatggatttttttttttttttttgagatggagtcttgctctgttgcccaggctggagtgccgtggtgtgaccttggctcactgcaacctctgcctcctgggttcaagcgattctcctgccttggcttcctgagtagctgggattacaggcgcaccaccaggcccagctaatttttgtatttttagtagagacggggtttcactgtgttggtcaggctgttctcaaactcccgaccttgtgatctgcccaccttggtctcccaaagtgctgggattacaggtgtgaccagcggtgcccagccctcagaacagattttactgatattccccatgtaactgttctaattatacatctagtcctttttacaaggtcaagcttttagactcacatattcagatttcctgtttcaccctaacattacctaagatctacaaaaaaggccttgaagttagattaagattatgcaaacaacatgctgatagaattcaagagaaaagaaatttgacagcttataaaaatatttatgaccttcctcctctaattgttgatgacttccaacagtgcaataattcaataatagaaccctggataattactgttgacacctccctacaagtaactgttaatgcacaaggtactccatctacgtggaattacctgttgtgacacatcgagatacattttcatctgtgggggagcctacagtcagctttattcatgggcaacatcatgtctcaataaatggaaaataaagcaccaatgtggtctgggatatttctacattcaatttaaacttgcaaaatctgaacattggttgacatctactaacttgcaccatcatatcaaaaaagacactctacctagaggcataaactcagcaggatgggcctcagttgttagatccttcttcctctggattggggttagtaccttagaaataatggttagaaatttatccctaactattggagctccagctgactccacagccaaagccatggcagctcaccaaacttccttagattttcttgccaaagtggttttcgataacaggattgctctagattgcttattagctgaacaaggtggtattcgtgcaattgcttacactagctgcacatggaagtagaaaacacaattatgaaagataacggaacatgccacctggctccagaaagttccacccaatgcatttggacttttcaatctgtttagtgacttaccttcaaaataagattcatggtttagagctatttttcaaactgaattcatgatactattgctgcttattcttgacattatgatagttaagttacattattgttgcctgtctaatctttgcaaagcctgctttcccaacaggaaaatgttagtccagtgcttccagatgattgctaatgcctgtgtaactgataagatggaatccaatgctgaatctcaggtagacctatcctgtaagggtctttccttccggcccctttgttgtccaaatgtgacttgggcctctaatgttgactcctattgactcctattttccctctagtgtggggtcagaacaactaggacaaagcacatcccggcattgagggagatcaagcctaacttcaaggatagttgaccagtgatgctttcagggaaagatcttagtcaaaaaagggaaatgtgggcgcgggggctcacgtctgtaatctcagcactttggggaggctgaggcgggtgcatcatttgaggtcaggagttcgagaccagcctggccaacatgatgaaaccccgtctctactaaaaatacaaaaattagcctgaagtggttgcacatgcctgtaatcccagctactcgggaggctgaggcacaagaattgctggaggctggaaggcagaggttgcagtgtgccgagatggcgccactgccctccagagtggccaacagggcaagactccgtctcaaaaaaaaaaaaaaaggtgggggggtggcagggagcagaatgtgaaagttgattatctaaatggagtcatacctgtcatacccaactaaaatttacagtgcagggtgggggggcatagagaaaaaacaaaaatgaaaacaaaactcaggtctcaaaagcctgctccagaaactgtccagtaagcccaattcaacgaaacagctgctacagttttaagactagttttacaaggaaacagccaccatgactttaaaactagttttacctagaaattgtggccactgaccaatcagagctcaccagctcctgcaaaaaacatgttgcaagcaccaaagagctttctttcataacaacccacatactctttctcctttcccaataaaaccttcaccatttttttgttctaccacatatcagagaccaccctggtctacgcatgtgtaccagattgcaaccctatttctttattccaaaataaaccctcttttgcttggagattcatctctctatatatttgttattgatagaagataaaaagctaataagagactgtgtgaacatacacacaaatgaataaaagttggtgaactacctaaaataaatgagatcaagcctgtgtatttttgtctttagcttccggttgggaagaatttcttcctttctatagctgtgagaccatcaaccaaaattcagaacaaactccaataagttgcaaaacactgatcaaaatcaaatgctcactgcagcctcaaaatcctgggctcaagctatcctcccacctcagccactgagtagctaggactacaggcgcatgacaccacgcccagctaattttgttgctgttgttgttgtagagagaggatcccactatgttgcccagcgtggtctcaaactcctggcttcaagtgatcctcttgcctcagcctcccaaagtactgggaatacaggcatgagcgaccatacctggcctaaatgctctctctctctctctatatatatatatatatatactaacctgtaaatttaaaatttcacctaatgagccagcttaaactggaaattttgttttctaataacatttgttttttctgattgaactgatgttttccaacagtagcaaaagctgatgtatagcatttagaagctaaatgtaactaccatgtaatgtagtagtaaatgttactatgtaatagttacatagtaactaatagtatgtattagtagtacacagtactaatactgctgatactactgctagtactatgtaactggtagttacatagtagttacattttgctactaaatgtaactgaatagcatttagctactaaatttatatatttaaatccatgtttacttacatttagctactaaatgctattcagttagtagtgaaatgtaaatatgtgtttaagtatatgaattatatctttaacagtcatgcctattctttagccctacatttgccctttgtattcttacatattttaagatgaatatcagatgtagttctaggtaaatgggaagctcatgatgcacgaagacagaaatggagaaattgagaagatttatgaagctaggtagtattataacatttatcggacactcgctatctaacagactgtgttctaagtcctttgtaggtgttacctcccataattttccctgatattattgctgtttgttctcattttagtgttttggaaactgatgcatgtggatattaagtaaatgccgaagatcacacgaactgttttagaacaaagattcaaacttaggaaatctgattctaatgttcacgtagttaatcactgtattagagtttctgcagtgtacggaagtgttagttttactgaggatgtattgagtttgtctagtagatgtttggtcatttgaaatggaatatcttaaagattgtgaaggtatgaaattggcagtgagacagaagtgaaagtcactgatggcagacaggtaaatacatgaataattcagtagctcaattcattccaatgtattttcctttagcacctgctttgtgccaggtgctggtgtaactacccagtgagttctccttgctcgctggctagacagagtcagtttataagataggggaactgcaatagaaaaagagtttaattcacacagagccagctgtacaagagactggagttttgttattactccccaaacgcttggaggttaggggtttttcggagacagtgtggagggcaaggggggtatggtagggggcatggcatactaattggctgggttggagatgacaccatagggaattgaagctgtcctcttgggctgagtcagttcctaggtggaggacgacaggactcgttggcaggtccaggtggggccatctggttgtcagaaatgcaaaggcctaaaaagatacctcaaaaggccagtcttaggttctataatagtgatgttatcttcaagagtaattggggaagttgcaaatcttatgacctccgaaaaaatggctggtaattatttataattcaggcccctttcatcctaactttgtggactttcactcattttataaaaatagtttagtttttgggaggggctattatcatttaaactataaactaggccaggcacggtggctcacgcctgtaatcccagcactttgggaggcccaggcaggtggatcacctgagatcaggagttcaagaccagcctggccaacatggctaaaccctgtctctactaaaaaatacaaaaaattagctgggtgtggtggtgggcacctgtaatcccagctactcaggatgctgaggcaggagaatcacttgaatctgggaggtggaggttgcagtgagccaagattgtgccactgcactccagcctgggcaacagagcaagactccatctcaaaacaaaaacaaaaaacaaacaaacaaaagtatactctaaatttctcccaaagttagcttggctcatgtcccagaatgagcaaagacagccaacctgtgaggctagagtcaagatggactcagccatgtcagatttttctcactgtcataattttctcagttataatcttttgcaaaggtggttttactggcctaagagatatggatgaattcagggtgaacaggacatttgaggtctctggtctcacagagcttacattctagtgggaggagatataataaataagcaaatcagtaacatttcagtgctataaaaaaaatcaaggtaatagtgtcttcggatgtgtttatggaggctgctggctgttgactaccttagatagtttatctgatagaatgaggaaaagaagtctttcttcttcttcttttctttcttttttttttgagacagagtcttgctcttgttgcccaggctagagtgcagtggtgccatctcagctcactgcaacctccgcctcccaggttcaagcaattctcctgcctcagcctcctgagtagctgggattacaggcgcctaccaccacgcctggctaatttttttgtatttttagtagagacggggtttcaccatgttggtcaggctggtcttgaactcctggcctcaggtgatctgcctgcctcagcctcccaaagtgctgggattacaggcgtaagtcaccatggctggctgaggaaaagtctttctgatgagattgccagaggcgtttaaacctgggcaactccattttgagtaggggctaggtaaaataaggctgagacctactgggctacatttccagatggttaggcattctaagtcacagtatgagacaggaggtcagcacaagatacaggtcataaagaccttgctgataaaacagattgcagcaaagaagctggctaaaacccaccaaaaccaagatggccatgagagtgacctctggttttgctcactgttacactcccacagtagcatgacagtttacaaatgccatggcatgtcaggaagttaccctgtatggtctaaaagggaaggcatggataatccacaccttgtttagcatatcatcaagaaataatcagagccctcgggggtgctctgtctgtggaatagccattgttttattcctttacattcttaataaacttgttttcactttatggactcgccctgaattctgtcttgcgtgagatccaagaacattctcttggggtctggatgcagacccctttccggtatagagagaacattttaggtgatgtcatatgttgaggagctagctgtgagaagataaggaggtgggagtgaggaacattgagaagaagaaacgaaaagtgggcggctctgagaacgtagctgtaccccagacagaaaagtactataccattattatattgtactttgcttctgtgtcagctttctctatcatccagtgagctgtacaaattatctcaaaatctttaacacctattatatagtagacattcagtaaatttatttaacaaagggatggatttagtaatcatttcattaagatttcatgtaccagatacctcagagatacaaaaatgaccaggtgaagggctgtgccctcagtgaactcaaagttgtgggaagcagagttgtgaacaattactgattactaatacaaggtggtcaatgctattggtgctactacagcattggaaggatgatatctcactgtatttgaaagatatgaggaaactgcatagaagtggcaaagttagaggtgagtgttgaaatgtacctaaattagttgaggggtgttaaagaaaaaattattcaatgatcttattaaggcatggacaggcagagtgcgttcaagaccattgcaatagatataggaattactgcaacagggtcttgtagttgggggagggattgggttcaactccgaatatagcataagcaagtagaaatttatagcaaagagcaggctgagggtcagtggatgaaaaattactaagaggaaatatcagaggtaaagagaattctggttaaactcatctcaaaggattcttgctgaagacagccagggtaatcagacttcacctgggggtgaaaagcgaaagcgaaggatgaggaccccagtcagatatctaggatgggggattcttaccaaactgacatagcacggttctttgctaaaactggattttacaagaaagtacacagacagacctaggacatggctggttttcaaaaaccccaagaagtttaggagtagagacaataagttaaaaccaggagtatatgcagaaagagtagtaggccaggaagcgtattcaggaagtgtctgtggatcacattgagggactaagtggctaagttggctggacttcctggttcaatagggacttccctaaggggactttcccctaagccaaaatgagtcatagctgcaagctaagggattgaaacttcaaccaatcaaaggggactttcccctaagccaaagtgagtcccagctgcaaattaagggattgaaacttcagccaatcatatagagagtttaagctctagctgcagcctgatgtttttaaccaatcaggcccaccaacctaagagaggagaccacccctcatattgtgttatgcccaatttctgcctccaaagaaagaagaatttaaaacaaaaaggcagaaatgaaatccacaggcagacagcccagcactgtgctctgggcctggtagttacagattgacccctgacctaaccgatatgttatctatagattccagacattgtatggaaaagcattgtgaaaatccctgtcctattctgttctgttccgattaccagtgcatgcagctcccagtcacatacccactacttgctcaatcgatcacgacccactcacgcagaccctcttagagttgtatgcccttaaaagggacaggaattgctcactccgggagctcggttttcgaagatgtgagtccgccaatgctcccagctgaataaagccctttccttccataactcggtgtctgagcggttcttgtctgtggctcgtccggctacaaacccacaagtggatagaaaataacctaatcctatgggacagaaaaaggaaaaggggaggagtcataaggggatataaacataagatacccaaaccagaaatggcaacccttccaggttcccttccaccacgtggaagctttactttcgctttccctttacttttgctttggctttaataaatcttgccaccgcacagtctttgggtccacgcatttctctagtgaagctgtaacacttgccactgtggtccacggcttcattccttgaagcctgtgagaccatgaacccttcgatcgagaaaaacctttgatcggaagaagacttctcgtctcaacattaaaggacaaagaagccaactctaaggcatgccattagctttaataatctgagtgtaataaataataatgatcataacggattaaaacatcagatctgtaaaaaatgcatgcattcataatgatatcaaacaaacaaaaactttgtggttaactctggagtttggtagggcaccaactcatgtctctgaaatttcataattaaaaagaacaaatccagcatttacccagtctttcctctatgagattatcctggttatctcaggataaccaatgagttggtatgaaaagattccttttatagaagaacctctggtaataatagagaattattgaaaggattagaaattcactgctctaggataaaagacttaagagacataccaaaatgcaacatgaggactttttttggatcttgactggaacaaaccaactataaaagataatttggactcaaacaggaaaattggaattatttatagtactaaggaattattgttaattttgttagatatgataacggtagttaaatttttaaaatctatgtcagtttgagatgcagactaatttaagggtaaaataatattatgtctaggatttctttaaaaaagaggggaaggaaactgaaacttgattggcaaaatgttgctaaatgttgattctgagggatgggttacttgagggtttgttattaaaagtagaatcacttttgcttatgtttaaaattttccattataaatagttttcaaaagcagagccagtgcctaccccacatcatcttctgttatttaatgcccaggactcagaaagggtcagcagtctcagatcaacagttactgatgtcctaacccatcctaaacactgatgctaatgagtgtggggcaaagttcacagcgtgctaaggagcaacatttaggaacctgactggattccgcagctctcgggacaagccccctggaaaagggctggggggaggggcggggaggcacccaattattctagaaggttctgagatctcccagggatttccgagaggctacgaggtgtaactggcaaatcaatgacttaagagtagctttctcccagcctccccgctggctctggagtatagagggaagccagccttttcctcccccatcctgcccctcccctctcttctcatcttcccctccactctcctcctgaccctggcctggccactcctgctttcacttctctccactcctcttcggccccgccccgcggcctcctccctcctccttgccccgccccctatccctgcgcgccggcggccgttaccatagcgacgtgcacgcagtagccaggcctgacccgctggtcccttgctggcgggaggaaagaggcggcaccatgagccacgcagtaaccatcgaggagccccaggcccagccgcaggtgtctcaaactcggtaccgggagaggtcgcgggctgggagccacatctcctccaatcgagcgtatgattttctgtacggtaaggaccgccgcagaccttcctccgcgtccgtcgcctcctaggccaggtgggctcccagatggtgggacctggccaggggcatggcgaacgaaacacgaccctctggactgacctcttgcccacggttgtccttggtcgggtgggggcagctccgagccctccaggtggccgcactcaggttggggtcgggggttcgggtacatcgaaaggcgcgggtgcgctccgcttcggggggcgattttcctgaaacctgttccgggcgttttggtacccagaaagtgtgcaacgatttgtacactcggagattcactcaacgttcctgcataaaatgccctacaaaaatgatcttttctctccaactctctgggcaaatccaagttgggcgaaaagaagtgccagtttatcccatgcttgtttttaggttttttgttgttgttgttgtttgttttttttaacttctgcgtcaaagcattgcttatagactgggtccgctggctcctcttgggccaataaaaccccagtttattttaacggcttggttgtccattttatgttttctctctctccacgctccttgagttccttaagttcctgttctacacatttttgtagccttctgagcacctattctagtgctgatacatatactaggcgcttcaataaataaatgtttattgaatttgccgtggcaagaactgtaaccagctataagcatgattttttccaattttgccctctgcaatcccaggtttttcacctgaaccttgcattgctttcagcaatgtggtgttgcctctgggaatcccagtctcctttgtgtgggaatctagggtacacattcctagatagaggctgtgtaatgattgctgacatattctggccagtgtttttctgtatttactcttggttttgtgaaataaatcaagttagctcctgtaaacacatcaccatgtttttttttcacgggtaatttgagaaggaggacaaacatctccccaaagtatttattaagctggttgtttctttgatgccgaagtgtctcttttgcagaggaattgctaaatgtttccatgtcccttgctaagaacagaaattcactcagagtagatcaaataaaagtttggattgttataaaacaatctcgccgctagtcatggacaggaagcgaagtatagccagggcggatgagaacctggatggggaaaatcagaactaagatgctgtgctctcctgctttctttctttgaccttatgacctttcaccttgttagggttgccacatttagcaaataaaaatacaagaggcaccgttaagcttgaatttcagataatgaataatattttagtataaatttttgtcctgtgcaatattttggaacacatttatactaaaaaattattcattgtgtatctgaatttaaatttaactgggcatcctgtattttatctggcaactctagccttctttctatgtataatcaagccccaagtaatgatatttcggtcaacagtggactacatgtataaggatggtcccataagattataatgaagttgaaaaactccaattacttcgtgacattgtagctgtcataacattgtagcccaatgcatcactttttctgtgtttagatatacaaataccattgtgttacaactgtctacagtattcagtacaataacatgctgtatgggtttgtagcctaggagcaataggctatactatatagcctaggtgtggagtaggctataccagctaggtttatgttaagtaccctctgatatttacacaacgataagctcacctcataacccgtttctaagaacgtatccccatcattaagcaacacatctctatgcttgcttccttccatctgacagaaagcctcttgtgtatggatttctcttactatgatagggactagggtggcgtgcttcttgactaattagccctaaagctcaccaccaattgtatagcgtctttgtgtattgtagctgaaaatttaagttagaaatttaagattggttgttggctggccaatgaattgactggccttgggccaggtttccaccttgacagaactgtggtggtgcaaagatgaacacctttccaggttcttttacccttccttatgaagccctatgtgattagttccctagttacttctctggcctcttatctactctctttcccctccttcattctgcctcatttgtcctggtttctttgctattcttcagacgtatcaggcatgttcccatcctagggactttgctgttcttcagatgtatcaggcatgctcccatcctagaatgttcttcagatatctaactagctaactccctcaccttcaagtctccttacatgccaccttctcaagggcctgccccgaccaccctagttaaaattgcaacccaatcttccttacccgatttcttcttttttaaaaataacaaccctcaaattctaatgtgtaatttgctagtttattatgtttgttgtttgttgtctctctctcatgaagtcaaagatttttgtcgttttgttgatgtattctaagcacctagatagagtagccagtcaataaacatgtgttgaatgaaggagcaaaaagagcctgagcctcttgcagcttttcagccttggtgggaatatccaatgtctgcattcagtaaatcgtatttgttgggttactaatgaattattaggttttaggaattgacacacattatccaaattcaaaagagacttgtttctaaatcacaattcccaaattattaatttctatggagaaatatgtgttaccatgttatctagactagctggtcagggtatttgcctccccagagacaagtctacttgggaaatcaagtgtatccaaaggctgcttgttaatttaatggcaaatcagttgattttaaagggtggtacagtatagtcaatcatgaatattcttcatcactttaaagatatacctgataaacagatacttataatagcagggcaatattttgttgaactttgtaaaaataacagttccatcatcagcaaacttacaaacttaaggggtgaattctgaagatagctgattttttttttaaccgtgttcaccaattctgagatatcatgtggtttgcatctttctagtgcaccaaatatgggagatggtataaatgtattgcttctttcacttgcaaattggcatagtgcgtatatacaaggtctttcccttgaagaattttttgggttacccaggctcaaaaggagttttgttcataggagagaagaaagtgtgttcagggtgtagtacttgaaaacatgctagactttctttatgaattccacttccgtaagctgacttggaatactcagaaaagaaaaacatcttgacaactgttgctggtagaagtggtagagtaacagggccacatgcacaacagagcatgagctgctgcagagtcagacaatatttaaacttttaaatttgttttccaattaagagattacattactttgccattattctcagcctaggggtagatatgttctatctgttatgctacttgattgtttattttgcagatccattgtttattgtgtcaagtgagaaagaccatacacaggcaaatatccaagctaccctgattcgcagcagactggtatgtctaattcatcagccaaggctacctgatgaacctgaaccatctagtttgcctgactgcattgatcagattgactaatcaccaaatcttcactggattttaggttccacagaaattaccttgccaagattactggagggcaaagcatcttaatacgtgtggctcattgtgaggattaagtcaccaataatgaacagagaacccataagctaatttatttcaatgggataaatttaataatatatgcccatgttaaaagaattcaagtagtataaaagcatatacagtgtgaagtaaattctagccctatcccctaccccctccacataaacagccattgtcatcagtttcttgggcatgtatttaaagatattttacgcatacagcaataacccctcttcttatgctgtatacattgttttgtatgtttttaaaaagagtttacaatgtaattaaaatgctttagaaaagctgatggtataattttgtcctttgcctcccttctctaacattagagaaaagttcccaggtttaaaaccatgttcagtaacctgatccattatccaagatattctctatattggagcaagtcagatcctgtcccaccatttatcagtcgggaatggaagggacataaggagaaacacagagaagccctccggcagctcaccacgtaagtgtcgggtggctccagggcctaaaataaatgcattaaaagcatttctttaaattcatttaccatgtgtggttttaaaatgttcagttgtggtgttatacctaggccaaattttctttctaaacctcttttgaccaaacaaacctgattatatattgtatatatgagatatatatatatatataattttgtcatatatataatgacaacttgccaccaaaggtagggatgattgagtttgttgttgcttggatccaacttagcaactgaaagtgctctgttctgctagtatctaaaatattttttgggaacttggggccaaagcaccttcaagaataagtcgaattctttattcttttaattacttacaagttcacatttagtaaattaaaaattataaagccttttaacctggacatagaaaaagtgtcttttggccaggcacagtggctcacgcctgtaatcccagcactttgggaggccgaggcaggcggatcatgaggtcaggagattgagaccatcctggctaacacggtgaaaccccgtctctactaaaaatacaaaaagttagccgggtgtggtggcaggtgcctgtagtcccagctacttgggaggctgaggcaggagaatggcatgaacccaggaggtggagattgcaccactgcactccagcctgggtgacagagcgagactctgtctcaaaaaaaaaaaaaaaaaaaattgtcttttaatattttgctattcttgtgtgcttttaattaaaattgggcatttttgtatgtgggatttcataaatccactcttttctcagctcttgctctgtctgactaggttctggtctcctggctcaggggaagaatcatatatactctaagttgtatggcagtcaaatgcaggttatggaagactttactctcagtatgagatactctgtgtaggtcctactctatacacatagaaatattaaatagaaattatatgtggaaatattttagacttgaataatgttttcttgcttcattttagaactgacgcttcttttcagatgcctaaagaagtttatgaagatcctgaagttactggaaagaatcgctataaatactttgaaaggtagaacataattactaatgaatatttgagccctaatattattagagaacctctttatgataataataatagttatcatttttcagtgcatacaacgtgccagactctattttaagtgctttacatgcatatgatctaatcgttaaaacaggaatgtaggctaagatatatatgatccctgttttaccagtaatgaagctgagaccgagagatgataaatagattgctcaaggtcatataagctagcaaggggtagatctggggttccaactaagcctgcctgactttagagatactgattgcaactaagaatatgtatttgaaaatatttgaaatgaagtcatcaaatgaacgacacacagttggagataccatgaagtcatagtgaaggggaaacttgtgttcaaagggataacatttgttctctttgtatgaatcttgcctaaaccaacaaggccaaaaggttcattttatttcatttgtgatttatgcttatgtaataaccatatactcaaatcaaattaaaattagatggggatttccttatatatcctactggagttagaaaaaatagtcttgataccacatctgtataagcttccttgagaaagtaaatttctaatccacattattatttatgagcaacctccttatggaaattttgtgatactgacttttccagagaaatgttaaattcttaactgttaactatacaattctgtacagttaactgtacaattcttaacttttagggggaggcttcatattaaatcactgtgaattccagaatgtctcaggaacttgagaagttgttgggaactaatggccagctgaagcccaagtacagggcttaaagtgtggcttcttcaagtgtgacttgtttcccatctgaagagaaaatactggagtgtttattaagaatgcacattcattggctctaccctatatgtactgaatctcatgggccagacctgggaatctgcattttagacaagaacctccccaccctgcagtgattttttatgtccagaagtttgagtaacactgatatatgggatatttaagctcactgatttttaagggacaaatattagagctggaagagagcttagagtgcattcattgcaaaagtcccacacatttatgttttctttttcctcccaggccttttctcccattttttcagcagatgccattcaatgttgtttatgccgtatccaagtaagtaaccattatttgaaaactctttttcagtttatttattgtttgcttccatattttttcttagaagatagttcactaaatcactatttttcaaattgtggatcacaaaacattagaagggtatgaaatcttctagtgtgtcatgagcagcattttaaaacatgaaacagaatagaaaataaccaaagcatcaagtatatggagggtaagttggtttttgtttataacttttgtttcagaaaaatatatgcatatgtttatatgtatatgatggattatgatataaaatgtatttcttactgttagttgtccatttgtgctgctataacaaattaacagattgggtgatataaataaaataaatttatttcttgaagttctgaaggctgggcagtccaagaagcaaggcagtccaatgggcagtcagtgtcggtgagggccttcttgctgtgtcttcacatggcagaagaagcaaatgctgtgtcctcacgtggaggaaggtggaaggccaaaaaggacctatgctagttctctgtaatccttttataaggcactaatccattgatgagggtggagtcctcgtgacttaatcacttcccctaaaagccttacctcttaataccacgacaatggggactaagtttaaacatgaattttggagaagacacagacacatattcaaattgtagcagttgtagtttaaaaaagttgaaaagtgctttaaatatcttcttttgcttctctgaaacacttatttgatgacagttcttcaacatttcattaaataaacaaatcagtcatgtaatattttttgaatgctagaattttataacttaataaccatctaatctacacagataatgtggtatacaaagataaataaaacatggtttctgccccacaacggagtgaaccaaggtaagagggaggtaagggacaagggctgaatctgagacaaatgtgtatttcttgtctctagtttcaggacaagacagcagactggtagagtattcctttaaaaatctaatttttgctacactctttcctctgttaatataatttaatatttctgtaagagaaaaaagtctaaggtattcatgaaattatcaggaatagaaaccttttttaaggtctcatatttctgaatacaaatttattcaggactaggttttcaagggtgcatttaaagaatatagttattcctaataatatatatcatcatatgaacaggacatgtgttattaaatgtctgtaatcctcaagataaatgctagttatgactctacttcacccttgacatttttttaagactgtgtggatggctttggctctttatagagatggagtacagattccctgctctccctagacagagcaacttcttggggtaccagtttatccagaaatagctgtagacttatattctatgaaatgttttgtatgagcaaaaggggagctatgagctatgtagatccctaaagagccttctggtaattctttaaaatcaggctcactgaattacctgctttggaggtcataactgcctcagtctaaaagttgttaactaattctagggagttcagaggcctgcagtgatgaacaccatgacctccccaactcctccctaaataaccgtgacacaagggataaagattccatccaagagttaaaccatgacatttgacattgtagctactctctatctgtcttagaactttttaaagaatgaatcagtattcctgagtgaggtcaattctggaattccagtatgtttgagtttctgagcagtgagtataatgccaccttgtgttatcagggatggaattgtcttgggaccagctggccttctccagccacacccttttcatggctagctgttggagtctttcctttggattctacataagcaccttttcaaagagaataaaaagttaatacttttaaaacattcaatgaagttcatagtagaacaggatttgctaggtttgtgaagcccctctctgtacagctctgttggggctgggagagaaaatctagaagactgtaggtatggcagacagtgcatgctcctggtgcctgggcagtggtggaggaggaaagggcctggatagaacacatagagcagccctggctgccataagagtactaaagccagagcaggtgagcctgagggcaggagccaggacacagcaggggtcaggccagcatggagcagatgtgggacctttctgagtttgggtcctgtttgaggttggggaggaggtgggaaagggatcattgctctttgttactcatattttactctcccctaaagccaacagaaatggggaaaaaataggttggagaaattaagaagttagttaagaaaccatgtattaagttactgaaagagttcaaagtagctttcctcttttacattctattccctgacccacctggaaagatacgaagccagaaaccttcatcagaggagttcattaggccttattataaactaagcacatttgatcacatggttcaaatgtgtaattatttaatttgagaaaaaataatttattctcttgattcaagataatggtgcagtaatataataaaacttcatgtgacttcggatgacaaagctgatttgaagttatttattcaactagaattttatagtagaataatttctactgaaaacataagaagccatatattatctacatgttagaaatttatagcaactattggaaagtgacttcaatagcagttacagttcagcattacaaactaaagcccgtgtgcggtggctcagacctgtaatctcagcactttggaaggccgaggcaggaggataacttgaggtcaggagtctgagaccagcctggccaacatgatgagactctgactctactaaaaatacaaaaattagctgggtgaggtggtgggcacctgtaatcccagctacttgggaggctgagtcaggacaatcacttgaacccgggaggtggatgttgcagtgagctgagatcacgccactgtcctcaagcctgggtggcagagtgagactccatctcaaaaaacaaaacaagacaaaaaaaaaaaacaactatttaaagtacttgctccagcacaggttgaacttccaaacaggtatttctttctaactggcttgaaatgcttttttaaaaaatttttattttatttttatttatttatttatttatttatttatttatttatttatttatttattttttgagatggagtcttgctccatcactcaggctggagtgcagtggcgtgatctcggctcgctgcaacctccacctccagggttcaagtgattctccttcctcagcctcccaagtagctgggattacaggtacgtgccaccacacccagctaattttttgtatctttagtagagagggagtttcacatgttggccaggctggtctcgaactcctgacctcatgatccgcctgccttggcctcccaaagtgctgggattacaggcataagccactgtacctcgcccttttttttttttttaaacatctttggtgtatgtatttgctgtgctcgtatataagctcttaccattgcctctgtttttcaaaatggaaatatctctttgtttttgccttcatctttagttatttatgtaatttaatcaatgctttcaccaacttgaaaaaaatgccttaagtcaaagtggctatattggtttttttcttattctagaggcaatgcatgtacatgttaaaaaagaagattcagaaaagtataaagatgaaaaaaattatctgtataattttaccatctagaaataattactattaatttattgtatatacatctaggtatttttgtatgcataaaaacacagttttaaaatgtaaaaatggaatcctactatacataccatttaatagtgtcatttttttcttctttacaatgaatcatggatatttttgaatgctcacaggtatagattacattattattttgaatagctgcataaattccattatggctgtttcatatttttttaaacaattctcgtattgatgtgatcatttaagtttctaatttttcactcttagaaatgagactttatgaacatgtttgcatatatatctttgaatacctgtccagttatttcctagaataaattcctaggagtagaaatgctggagcagccgggcgcggtggctcacgcctgtaatcccagcactttgggaggcagagacgggcggatcacgaggtcaggagatcgggaccatcctggctaacatggcgaaaccccgtctctactaaaaatacaaaaaaaaaattagccgggcgtggtggcgggcacctgtagtcccagctactcggaaggctgaggcaggagaatggcctgaacccaggaggcggagcttgcagtgagccgagatcgcgctactgcactctaacctgggcgacagagcgagactccgtctcaaaaaaaaaaaaaaaaaaaagaaagaaacgctggagcaaagcgtattttaacttgtcaatttggtgtacctatttgtatttccatcaacagtttatgagaaggcctgtttcttcacaacataatcaatgctaggtactttcagtcttttaaatctttgcttatgtgataaaatagcataaaatagtatcttgctgttttacttttctttgattactagttattttcattatcttctcatatgtttgttagaagttttactttttgttttgtgaattctcctttactcatttttccatggggtatttaactgcctaattgatttacaagggctttttatatagaaaggctatttaaactttttatcatatatgttccaaaacctttttctaagtttgccattcaccttttaaatttgtttgtgatattttgaggcatagaagttgaaacttaccctcaattctattgatcatctccttttatggtttctggcttttaagcccggcttaaaaagaccttcactcaaagatgatataaatattgacttatgtttcctgttagtacttttatagtctcatttttacattaatttttttaaagatctggaattaatttttctgcaagagacaagctaactttcccacatgttaataacaaagtgatcccagcattaattattgaatcatttatccagatagagcctgtctgcctgcctgcctgccttggttcctcccttccttcctttttctctctctttctttcagcagaaaccatctcttctcttttctctgctcccatatttctggagggaaacagagagtggtatggaactgaaacaaagaagaaagaaaccagagaatgtagtaatgctgaacaggttcagaagtgctgtacagcattctagaatagctctgttctacaaccttgcccagtgacacacatataaataggcacttctgtgggtcaaccatggtactttgacccacttagtttcctggcagaggtgagaataacaaggcaattctctcaagatttgtgcgcataatcctggttataatggattcatgattttgtacctgtcaacatttaaaagaggaatggacttgacaaagcttcgaagatttgtttctacttgattatataatattttaagtgaccataacaggtttcaatttttaaactgatttttctcttttagggcagaaccatacacttttcctcctacttctactaagcacctatccatcccttcaaagtctactgtgggcactcagactgattatcgggatgctgacgttcaaacagatccatactctgcagaatatgtagtatgtcaggactcaatccctgagctcttgaccctggctacgcttacttggggtgagttggtaaatctcctgactattggcagatgacgatgctgataaccacgcatgctgttcaaatggcccatgtacaggcaattgtggtttacagtgttgctatataaagtgtcttagtacagcaacttcatagactcataatttttctgatacttctggtcaaataaagatactatctttttattgtgagtagttttatcgtactctatctgtgaagctgaatttcagcttaatattgcagttgctttgctgactactcacctatgtcctctcatttctctctcctagtgaaccacttccttttcattgagcaatcatacttctttaaacataagctttgagtgtaaaatactgaatgcacattcctatgtatgtcatattatcttaatttgccaaaatatcttaatttaccaatcctcccttatatactttattagatgatttggatgacttgacattatctctgaaatgctaaatatctttcaggctcagaaattaactcttagaatgtaataaaatctggcctaggcctatattatgtgaacctataaaattaataagtgagactacctttagaaattattagaaattagcttatgtaactcacttagttgtattaatagctgggaaactgagaaccagagaggttaactaattcctccaaggacatagagatagttggttcatggtaatgatttttaaatgagattactttcccccgcattgtaacagatagctgtgatcaagtctgcgtcccagacaaagaagatgttcatatctgggctctagttttgattcttgtttcctggcccactttatgaatccagattaagcattatcaacacccatacttttttttgagacggagtcttactctgtcgcccaggctggagtgcagtggtgcgatcttggctcactgcaacctccgcctcctgggttcaagtgattctcctgcctcagtctcccgagtagctgggagtacaggtgcatgccaccacacctggctaatttttttattgtatttttagtagaggtggggtttcaccgtgttagccaggatggtctcgatcccctgacctcgtgatctgcccacctcagcctcccaaagtgctgggattacaggcttgagctaccgcacctggcccaacacccgtactttaaagcagaggctctactttcaggcctagatggcaaattaaaaatatgctgaaaccttccctttctgctctgaatgcataaaaattacaggaaaaaattaataaacatgtagacacacttaaaagcaagaaagaaaatattcgtaatgtagaaatggagactttttcctaagaaagaagtagctgggaacctttggtggtgagtaggagctgtgcatggcagggaaccaggtccaagtcacctgcctgaaggtgaggggccagcgcccttctcctgcacactggtgcaactgaagcctggtgcctgcccaataaagattatagacagagcagagtcaggcattcctgcctgtggccttggactttacctcttggtgtgataaggacttggcgttaaactgcagaaggacaagagccaggcagaggctcagaaatgcttcattaggcaaaaaacaaacaaaaaaaacaacctaatctggtacactgtcatagcagaactgaagttaaagtgtcaataaaagcctctatgagacaggcctactcctaccatttgtgggacccaggactctaagggaggcccacctaccatatgtatagatattttaaaattataaatcaagctaatatctgttaagtaaaatacgttggtttttttttttttttttttcacaaacatctttataacaagttaaaaggacaagtttaaattggaattcttagactcctgggattccatactgtaatgcagcagcgaggtgagagcctgctgtggcctgcccttttctctccccaccctggctctgctctacatctgaggggcctgtcatgcatgcccgtgattaccccagctcttcttctcaatgttcacacatccctacgaacagctgccatttggccccaccttgggcttcagggtgaagaaacagcagcatatagtatgctctcaggaatctgaatcctgtgaagaggcccatggaacctttggaagcaggctcggggccatttgtagaaggatttccaggaccacctggaaatagctccaggtgggcatgaggccttggactcctcaccttgtggtgatgagcagggttctaagaatgaatttaggtagtagccactcgcaggtcaaggctgcttattgaccagggtgcttatgagagaaacctgcagctggtctccacccaagaaccccaaagcacacaaggaacagagacaccaggagtgacccacaacaaataaaggaaatggaagaataaatttctgagtaaacagaaaatggagcagtctgaaaaggacttaggaagtgctttctatattctcaaaaggatgagggggaaatagcaacaccaaaacaagaatgggagtcatgaaaaagaaccagttggaatcaagggggaggaaaactataacgtttgaaataaagtgaactcaatagtagaatagacggagctgaagagcaaattagtgaaatgacagattaaatggacacatattccacaatgcaacatatagtggtagaacaagataaaagaaaagtaagagctgtgggggctaggacatgagtatagggaaaatggtagagaagcaatgcaagaatcagtggctgagaactccccagaactaaagaaagacattagccttcacactgaaaaattccactgagtaccaagcagaatgattttttaaaaactcacacctcctaataaaagagaaagaaaaagtgaaaaaactattagaaaaactattagaaagataactcagattacctacaaagaaaaaaaaagatggatattttgtagtattgcctttaaggtgctgtgggaaaatgattgcaaacctagaattcttttaccaggcaaactattattgaggagtgaaggcgagataaagacattttcatacataagaagaatatctatctcataggatactgtaaggattaagtaaatttatttatgtaatgtgttcatacctacaatccagcaatttcactcctaagtatacatcaaaaaaaaaaaaaatgagcacattattctgctaacggaaatgcataggagtgttcaccaaaagacatatacaagaaaactcacagcagcattaattatgataactccaaactgaaaacaacccaaatgtccatcaaccatagaatggatgaatgaaatatagtctattcacataatggaattctatataataatgagaatgaagtacaactacatgtgattacaagggagattgtagatgtgtatataattgcgtatataatgctgaacaaaataagatacagaagagtgcctacactgtgatttcatttacataaaatgtaaaaccagtcaaaactaaattaacgcattaggaatgagaatggtagctatccttgggacaggtagtgactgggaagggagtatcatgggcattctagtgttctggtaatattctattccttgatctgggtgctgattatatgggatgtttgtttttgtttatgtatgctgtacattcatgaaaagtttacataaagataagggaaaaataacgacagtgaaaaaggatgacactgtaagcactgcggggataaaattaagtgcttatgatgtgtcaagaactgatccaagtgctttacattttaaacctattcagtcttcacatgttaaatgaataataaagttgaaacaaatagttgacaatacagatcttttaaaaggcaaaagaaatggtcattagggccataagtaattttctaatgaagattaataatacagccaagcctcttgtaggaagcatcaagaaagaagacagaagatgcaaacagagtattgggatagaaagggggacagagtaactacagaataaacaacttaagaaatacgagagtgctatgaatatcttttgccctatatttaaaaacttagaaaggctgggcgtggtggctcacacctgtagtcccagcactttgggaggctgaggcaggcggatcacttgaggtgagaagtttgagaccagcctggccaacatggtgaaaccccgtctctactgaaaatacaaaaattagccagacgtggtggtgggtgcctgtaatcccagctactcaggaggctgaggttgcagtgagtgacccaagattgcaccactgtgctccagcctgggtgacagagcgagactccgtctcaaatacataaatcaaaaaaaaaaaaacttaggggccggacgcggtggctcacccctgtaatcccagcattttgggaggctgaggcaggtggatcacgaggtcaagagatcgagaccatcttggctaacatggtgaaaccctgtctctactaaaaatacaaaaaaaaaaaaaaattagctgggcgcggtggcgggcgcccgtagtcccagctactcgggaggctgaggcaggagaatggcgtgaacccgggaggctctgcttgcagtgagccgagatgatgccactgcactccagcctgggcgacagagcaagactctgtctcaaaaaaaaaaaaagaaaagaaaacttagataaattatacaatttttaaagaaaatgtaaattactaagttggttttaagaagaaatcacaaacctgaatagaagagtaactatagaaattgacctggtaaaaagaaaaaaaaattcttttaagagcaccaggcctaaacagttttacaggtaagtttaccacacctttaaggaacaaataaactgctttatgcaacttctttcaggaaacacagaataaaagttaatttattcattttatgagaccagtatagccttaatttgaaaactgaatgaggacagtacagttattacttagtattggtagcacattgattttaggaccctccaaccctaccaagatttttggatgcgcaagtctcttatgtaaaatggcatagcatttgcatataacctacacacatcctcccatatatttaatctctagattacttataattcctaatgcaatgtaaattatacataaatagttattatactgtattgtttagggaataatgacaagaaaaaagtttgtacatgttcagaacagacacagtttaaaaaaaaataatttcaacctgcagttggtcaaatccacagatgtagaaccatggatatgaagggccaactatactagtaaggaaacttacaggccaatctcacatatgaagaaatatgcaaaaaaattctaaataagatactagcaatctaatcttgctgtattttaaaagagtgacttataaccagatggagttaatcagagaagttcaagtttgttgcaataccagaaagccattcatgtaatttaccattttaaccgaaaacataggaaaaatcctctgggtgcaggaaaaagtattttatagcatgcagtgctcatttatgacatatactctgaataaactgggagcagaaggaaactttagagacttaataaggaatatctaccacagcctgtaataaacatcatactaaaggtgaaacttcagaagctttaccttaaaagaaaaagacattggtaatgctcattatcactactatttaacaacgtagaggagatcttagcccagagtttatcaagcctggctatgatctctcctttcaggaacatttgggaatatgagtggcatttttctatgtaataatgataggaagtgcttctggtatttagctcgtgggacagggtatagctgataggctggcatggatactaaacatcctgtactgcttgggggagtttcatacaaataattatctgcccattatggcaatagcaccctggttgaggaacactgagtcagtgcagcaagataagagaaaaatggaggcatggcgattagaaagaagcagcaaaactatccttatttgcacacgtgctctcttagaaaaataaattatcagaactaaaaagagagttcaacaagaagtcaacatacatcagtcgctttcctatatgagagaaatatccaattagaaaaattgttgaggccaggtgcagtggctcacacctgtaatcccagcactttgggatgccaaggcaggaggattgattgaggccaggagtttgagaccagcttggacaacatagtaagacctccatttctacaaaagaaaaattagccaagtgtggtggtgcacacctgtggtcctagctactcaagaagctgatgcaggattgcttgagcccaggggttcaaggttacagtgtacagtgaaccatgatcttgccactgtattcccacctgggcaacagagtgcgaccctgtctctaaaaaaaaaaaaaaaaaaggaagaagatgaaagaaagaaaaagaagagaaaaattatttagctgaggtcaggagttcaagaccagcctggccaacatggtgaaaccccgtctctactaaaaatacagagaaattagctgggcatggtggcatatgcctgtagtcccagctactcgggaggctgaggcaggagaatcacttgaaccgaggaggaggaggtttcagtgagccaagattgcatcactgcactccagcctaggtgacagagcaagactctgccaaaaaaaagaaaaaaatcttgaaaaaaattacattcatttatttgttttagagatggagtcttactctgttgcccaggctgaagtgtagtaatgtgatcatagctcactgcagcctcaaaccctatggctcaagtgatcctctcaccccatcctcccaagtagctggggccacaagtccacaccaccatgccatgctaattaaaaaaatatatttttttgtggagatggggtttcattatgttgcccaggctggtctccaattcttggacctagaaattctcctgtctcggcctccaaaagtgctgggattacaggtgagccaccgcacttggctgaaaaaaattacatgcacggtagcaatgaataacaaagtgcctagggaatcacttaataaaaatgtacaagggatttatggtgaaaagtataaattattctttaagcacataaacaaagatttggtgaaaagagagaaaatatttatcaatgggaaactcatgcttgaatagataagacttctccctcaaataatttataccttcgagtagttctaatccagattcccactctcaatataactatgcctgggtaaattagcacttttcatcttctcttcccagaaattatacaaaagcaaaagcaacaatactcccacgaactccattttcagtaaaactaaaaatatatgtaattcatgaaccagtaaatatttgtaaggactgcaaaaagcagctgagattgggcagatgcaatgtgggaggaagtgaagcatgcaccgtgggagaggaaccattaggggatctcagaaggcaggggcaaaaatatacttctgagggtaaattaagcaatatccagaattaaaaataatcatattttatgatgtagctgctagactctagcatttctacttctaagaatcctagagaagctcacatatggtacaatgagaccagtacaaggatgtttgttgcaacattatgtatgatcaaaaaattaaaagcaatctaaatgtcatttgagaagatagatagcttaaattgtaataaagccttacagtggaagaaggaaactagatctgtatatatcagtacagctaggcttccaaaacaaagatgagtaaaaaaagcaagctgcagaatgaatagctatagtacaataccatgtatgtaaatattaaataaacatcagtactgtgtcttgcttctatagaattcatttttggttcatatttgcttttactagacaggaagtatagtatagtgcacaaaaatacgaggttcagactgccatgtgcaagttacttagccttttagcccttcagtatctttatttgtaaaacaggcgtaattatgtttatgtgatagggatttgttgaagattaaatgcattagaaaagtgcttggcataataaaagtgcttaaatagccaggcatgatggcttatgcctgtaatcccaacactttgggaggctgaagctagcagatcacctgaggtcaggagtttgagatcaccctggccaacatggtgaaaccctgtctctactaaaaatacaaaaaaaaatgagccaggcgtggtggcaggtgcctgtaagtaatcccagctactagggaggctaagacaggagaatcactcgaacctgggaggcagaggttgcagggagccgagatcgtgccattgcactccagcctgggtgacaagagcaagacttcatctcaaaaaaaaaaaaaaaagtgcttggcataataaaaatgcttaagtaatgttaggttttattattattataattcatagacacataaatttgtatataaaatgttaagattgaatagaaaaccacaaattcctttttgtgtttacttggggaaatgggagaagggaatggggctcaatgtggtagttaaaaggtacatcggctttatttataaggtttcaattttttattaaaaaatgtgaagtatatatgacaaaatgtgtacagttgttaagtctgcatatttatggtatgattttcatagttattttttaaattactaaagaaaatgccacgcaagacccaccaaataatatgtagatacatatatatacatatatacacatacatatatgtggtattttgtatacagatttatttacttctttatacatctataaaagtaaaaagatgagctggtggtattactcctcaccaaatgcatcattgtgactgcctctgggaaggtgatcagaatgaggaagcagagtacagaactttagccttctctataataccctaattttattttattttatttttatttatttagtttttgagatggagtctcactctgtcacccaggctggagtgcagtggagtgatcttggctcactgcaacctccgcctctggggttcaagtgattcttctgcctcagcctcccaagtagctgggactacaggcgcccaccaccacgcctggctaacaataccctaatattaaaaacaagagatagtgaattcatatattacttatttgctttttaaaagcataaacattgcaaaagatctgaaataagacacaaatcttaggcatgccctactgtacgtggtagaaatatgacctattacttatttccttagatttttctgtataattatatttttaaatgaaaataaaacaaaggttggcttattgtggttcagtgatcaaacaggaaacttgttccagcctccctttcctttacctgcttttgcaaggccacatttagaggtgctaggcacctaagtgtgctggcatcctcaaaacttgatccagggaggcatacgttggcttaggtctcagccagtgtctcggagctggtcaggagacatatccagtggccacatcctcctgcctgacctacaggtattgtgtctttgaatgcttaaagttgcaggtaagagatagccctaaattttacattcactatggggacaaaacccaaagatggtgaattctcagctagtgattagtgtcttcattttctgttattttttaaaaaagtatgtggccaagtggctcacacctgtaatcccaacactttgggaggctgaggcggaagaattgcttgaaaccaggagtttgagaccagcctgggcaacatggtgaaaccttgtctctacaaaaaaataaaaataaattagccaggtgtggtggcacatgccagtagtcccagctacttgggaggctgaggtggggggatcatttgtgcctgggaggtcaaggccacagtgagctgtaatcacatctctatactccagcctgggcaacagagtgagaccttgattcacaaaaaagaaaaaaaaaaagtatatatttttcacttttatcgaacaaattccttaccccatatttttcccacctcagggctctgaaaatgccttgtatttcagtatataaatttgtttattacagagcattccaaggtgtgattattcagtagtcacttaatattcttcaaatgcattccagcattctacatgcaactaaaatgtcttacggctcaattactagcaagaggcagtggggcacagataacacaagctgtgaggcacatctagaggctgttccctaatgtcatgttatgctgtcatggcccttgaatttggagaagaggaaaggaactgacagggagttaattatatactggggggtgcatgggtcagctcacttgttcctaagctgtgctgctttatcctgcaggtcggggtctcccagcaggacaagctgaggtggagatgatagaaagagcccgcgagaagcgtgcttgggaagcctctctccccgctctgagtgacacctcccagtttgagaagaggaggaaaatgatgaatgaaatggagaggaaggagtgggccttcagagagcaggagattgaaaagtaggttctctatcacccagacaactgttcctgcactggtgggaataatgttaatactttatatctgcaaagcattctcccaaatgtatgggttgaaaagcaatcctcaacctatagagataggaaattgggcatccggttctttcaggagcagtcacatgcttctgatgtggtccagaagctctgtataattttccctccaaaaacattaaaatgtagaatgccctctgtgtgtttgaagaagctcagcatggaacccaggtttgaacaactcctgaagggcatctctgattcttcttttcccttttctctttagtatctatcttaactgtcacagaatcccactaatttctgcaaagcacctttcaaactgtcccttcatgttcattcccagcgccactgtcccagtgcctgggctttcttcataccccttcaaacagccttggcactagtcctagctcttacccaccccccaccccgacccaagacactgggttcacagtcaggatgccttgcgtgctagctagagctgatggggcatttcctagttaaaagacaaattatggaattcttccattaagagatgagtatataacaatatacataaataacaatatgctgaggtacttgtggttgggttttcaattattttaactgatatattttcagtaatggagttgttgctgatatgtggaaatgataagagattatgagaaccaaaaaattataactctctagcaagaacaaaggaagggcgtttgctgagtttgtcctttgtgctaggctgtgctgacgcactttattgctctaagcaatgctaccaaggacccttacacacaagagagggacctagagagttagagtctcagcttggtgctaaatttggaatatgttaaattttttgcaacaccttcagattaagcctgaatctaggctttgtgatgttttgataaaagcttgcaatttagtaaaaaaatagtgtttgggcaaagtaggtgtcaaatacccaatcctgttggcagaaatttaaatttattattgtactttggaaagatatgtgtcttttcaaaaggcattaaaactgttaaaaatgtatctggccagagtgaaaacgtcatctgagaaagcaagtacatttgttaaactgagggcaattttaatacatgtattttgagtcccttttacatgctagactctgtgctgtgagttgggaaaatagggatgaataggaaactgctcttcctgacagagctccttatggtccactggggcagggggagcagggaaggtggacaaggaagggacaaaagatcttagttagatcaacccctctcaggctgtgtctatcaggtgatgtgctgttctgtacaaaaagtgcttggtggaacccaggtgaaagaacagttagttctatttaaagtgggcgatttgagaaagaaaactactaagaggaggtagcttctgagctgggttttgaagggtaggtaagaagccatcaggcagatagtagtatcagacaataatatcagaagctatcaggtagaccaatacttgagaagtgttggtctgagattttttgcaccgtctccttgcccatctgcctgccccttcctgccccagtgaactataaggagctctgtcaataatatcagattgatgatgataatgatgatgatgatgatgatgatgataatgatgatgattagtggactataaggagctctgtcaatatcagataagtgaatggtaaggagctctgtcaataataataatatgataatgatgatgacgagtggactataaggagttctgtcaatgatatcagatgaagaagaagatatctatagagcatggaacacttatagagggcttactatgtgccagatgatgttctaagcatgtagacctcaaagtgtggtccacagaccagcagcatcaacattaccttggaacttggtagcaatgaggtgatcaggccccatcccaggacctactgaatcaggggttgaggcccagcaatctgtgtcagaacctgccctccagattatgctgcactcttaaatttgagactattgttagagcacttcgtgtatacattaactcacgtaatgctcacagcaacttcatgaagagggtactattattatctccactttaccattgaagagattgaggtcagtggtgacatggaaaattgaacctagcatttctgactctaaagagaaaggtgactggggtgtgtggcttagttttaaaaatgcctacctctccatactcatttgtcactacactctcgcccctctcaagtgcattcactctgagaaaccctgccagtgtgacatcttgctgtccctccagtccttttgagttgaacattcagcttcccctgctgaggccctgcttttcctttgtcaatgtagcaaatcccaaccctgagttaacagctcctctaaggaaggcttccccacctgttccctcttttccccctgccctatcctttcttcttccacgaagagttttcactcttctagcctggtatgtatctccttgtgcgggaaatgtcggttcttatgcctattccaccagaacagtgcttgttgagagaaggtgttttatcttgtacatcattgttcctgcctggcatatggtgggcacttaataaatatttgacaaatgaataagtgaataaattcaggtatgaatttctaagcaggagtaaaatgtatgttcaaatctctgttttaggaaggaaaaccttgacagctgggtggagcaaagattagaaggaggacagactagcagctaggagtccactttaggagtgatatgaccagacatgagccagggaatacaagaagcattgccgaggagagatccttagcagcgggaagaaggtgtaagagggtcagacttctgggggaacaaatgagtagggttttgttttgtttttttaattgtcaagtggtgactggagattcaaatagatggaaattctggttcagaaatatctaagctgggctggacatggtggctcacgcttgtaatcccagcactttgggaagccaaggtgggatcacttgaggccaggggttcgagaccagcctggccaatgtagtgaaactccatctctaccaaaactacaaaaattagccaggtgtggtggtgggtgcctgtagtcccagctactcgggaggctgacccatgaaaactgcttgaacccgggaggcagaggctgcagtgagcttagatcaggctactgcactccagcctgggcaacagagcgagactctgtctcaaaaaaaaaaaaagaaagaaaaaagaaatatctaagctggaggtacagataacagtcatctgtgcattgttggatgcacatgagcaaggtagcccaaggagaacaagttgaaggtaggaggaaaggaaacaaacatttgttgagtacctattatatgccaggaactggcattttcacctcactccttaggatagcatgccagaaccgcatttcctcttcactccccctattatgtaaccctccaggaataccactcaacctggcactgtgcacaaacctcttactgttcctttaggcccacctgcctagagagcccttcttttaccccatctgcctggcataatcttcttcatccttgagaactacacccatatatattcctattatatagagagtctctattgagttgcctcccccacgccctcaattcatctgtcatacttttgccagagtggtcttttggcaatacatgaatatgatagcagcccacagagaagagcctgtctgtggcagctgttcccttgccctctgtttgagatgccatatgcttctttatgttttgtaatttacttgaagactgcaggagattcgcctggaagttctaaaagagctgttgaggaagcgtgaagagaatcagaatgaagtgaatatgaagcacttgaatgcccggtggtctaaactgcaggagggaaaagaggcaaaaatggcaaaaattcagcgcacgcatgtatcaagtaatggtgtagtatgaacaatgaagacggtggaaaagtgggctttgctttggatctttgaccaaacctgacttaactatgatataattctgttttggtcctgggaatcacataggtaagggctaagagatgagttatttcttaaaggtagaagaatggaggaaattcccttactaagaaaatcaagtgatggtgtcctaacaggtagtcgagttactgagatagtgtgtgtgtgtgtgtgtgtgtgtgtgtgtgtgtgtgtgtgtgtgtgtggtgggataagtgttgggttccccatattcatggtccacagccctggataaagagccctgtttcttaccctttcttcattttgcccttaaaggagacattttagacatcctttttcctaatcaccttgctacaagaaattttaataccgcagatataacatatatatgtttatgtactatatgtatatgtattctgtactttatacatgaaaagaggaagtatatggtttattatttttattcactgcaagattaataatgactgaattaaagattcaagttaaatttatatttgaaaaatttaaggccgagagaggtagctcacacctgtaatcccagcactttgggaggctgaggtgggaggattgcttaaggctagaagttcaagaccagcctgagcagcatagtgagaccacgtctctacaaattttttttaaaaacagcctgatgtaatggtacacatctgtagtcatagctacttggaggctgaggtgggaggatggcttgagcccaggagctcaaggctacagtgagttgtgatagcaccactgcactccagcctgggtgacagagaccttgtctcaaaataaataaataaatagtatcaattacatgtgcagactatttatatatgtactcattcacaatataatcacattttaaaaaatcattcaaaacttatttttccaacaaaaacaaaacaatcacaaaaacaaattattgcttaaaattatgtttagtgaacttaaatttaaaatttttctttttgagaaaagagcacttaactgctagatatttatttagatacaatcaacatttgtttcagtacttggcataactaatgatagatctgactaatttttgtaggtgaataataacatttaaatcatttttacttaattctaaaacccaagtcacacccagaagtgctgagaatcaaacataaacaatatccccaagacagcagtggcacacaggccccctcttgcagcatgacgtcacgatcttgtataagatttttacccccattgaaaacgcacaatgcagagccgccaaaaggtcttgggtctgtgatgggatttgagagaaaaggagcacaggaggtggcgagcatgactctttagatgagtatactcctgatgtgcacagttgagcctttccctctgactgccaaacagttcagaaagctgtaagctgagacagtctttggtttattttggtgttaaccaagatgaacctgtagtctttgcttttgattatccttgtaggggagaataattccctagttccccactgaacatgtattttccagttgctttgagtttcattcatttaacaaacttttactgaatacctcttcttggcctggagcttgaaatgcagttataaaagatttttgacgagtaccgattgaggacactagctgattctgcttctgtcactcctgcctgtctcatgacaatctgggccacacagatggcagatctctgtttttaatgttacattctggctgtcgtgagtcatcaggaaattcattcatttcaatagcttctctgtgaataacactagcattggcttactcttctgcatttgtaattcagaacaatattttagagatagtcatggaggtatgttttatttcagcaatcagaaaacttgtaggaaagagaaagaatatagaagggaagttggagagaagaaatatcatcaaggattattctgattatgcatcacaggtctatggacctctgtctcgtcttgggtgtttcccagacaacaactcagaggactttgtagtaaaaaactactatctcaacacctatgaaggtaagcaatttacataattagaaatccagtataagaaggttgtctcagaaatatgattaaatatataaaatgtagaaatttagattaaaagctaagcaataaaaatatttgcaataaacactgatgatacaaaccaataaaaactactaagacccaaataaataaatggacacactatagaacagttcagcaaggaccaaattcaattagctagtaaatgttaaaaaaatgtttaatgtcactaataatcaaagttatttaacaatgaaattgagaaaagttttattccaggtttatgaagccaacaagaaatatgtataatgaaatcaaccttttataaagaaatgtcaaaaaactagtgggcaagaggatggagaaccaggtgataagttcacggagaggactatacctcttatgaagttcaaaagaggcttatttagttatttaatttcactgacaaattgaagtatcacatggccaagatcatgagttgctggttacactgctgaacttgtagctctggctggccatctccagagcaaaatgtaataaattggtgaacgtctactttagaagggtggcaccacatatcatagaatcattaattttctgttgattattattgtggaattgctacttttttgtagggcaatattttcactttagaatgcatttctcattgtacagtctaagtcactgacaacatgagttaattatatggaaatgtgctattacatttcagggacacttcattctattatatgagatacaccctctcaacaattctaatgaaactgcttggcaaacagctacaaaagttaacaatataccttaaaaataataaacgtaagcactggatactaaaaacatgtgcttccttcccataggattagtggaacttgagtcatgtctcccagattttgtgacacaaccccaaatcagagctccaaaacctaaagtcattaccaccaaagctggttttctgaagagggcagcaaggttggactatgagttggcagaggttcataaggtataatcattatctggaggacaaaatgcttctagtatgatttttgcagataaatgctacactccaaaaattgcagcaatgtccagtgggtcaaacatagacctacattctctgctctgcacttttctgaggttgcccatgctgtgctgaaccaatgtgtatttcccctcatttcacatttcaggagacttcttggagatttttttccccatttgcagaggtcatattactttctgaaagcgttttccacttggatctctatataaaatttgacgctatactaaggtgtagcaagtttctattgttggtgttaatagctataataggcccgattttctcccttttgtgttcatgtgatcagggcatatgaagaaaaagagtcatgttcaacacctttctcatgtagttaaagctctaaaggctctagttaaagccttcaccaagactcacagtacgtcatccaccagctgggctttcccttttggtagctggactataggtgtatagaatctgtggtttatgctggtggttctcattctttcctgtgcatcagaatctcatggaggacttgttaagacacatgcagctgggctccatccccaaagtttccgattcagtaggtctgaggtggggctggagcatttgccttttttataagtttcccggtgatgctgctgctgctggtccaggaaccacacctcgaggcccactgttttataatacactctcatcactggcccatgcatgcttgtttgttcagttgattttagtagttaataaaaattgatgggaacctatcctcaaaacaggaccttaacagtaatttatgtatatcgaggtggttctttcccacctcatccccacgcccccatctcctttcacccatcctgaatgctgtgttcatcattctgtcactttctgttaagatttttttatagattctttttattaggttacggaagttctcttcttaatttactaaagcctttaatcatgtgtttatgttgaattttatcaaatgtttatcacacaatttttgtatattttttaattattgtagtaacatttataattgtttataaatattaatctatccttgcatacctgggatgaacctgccttggtcagagcatacagcttattttcaataccttgttggatttgatttactcatatgttgattaggattttgcttctacattcatgagtgaaatgaccttcttgtttttctttctcattttgactatgtatggggttggtgttataattacgcaggtctcctgaagtgaacttgagaatattccttcctttttctttttttgagaagagtttaaataagattgggatgatttgttccttcactttggtagaatatgcatataaaattatctgggacaaatgttttcttcataggaaaaattttaaccactactgcaatttctttacaacttatagaactcttctgcattatttttggtaaatttttttttataaattccatttcacctaccttttccatttttttggcatatgattgttgatagtattgttttataatcttttaaatgtttgttttatcttattcatgtctactcttttcacttacaatattgtttatttatgccttaactcttttccttaatcaagtttactgaaggcttgcttattttcttagtatttatgtttccaaacaatgaacttttgattttgttgattttctgtgttatatttttaatcacattaatttatactcctatatttattctatatttctttctacttttttagggtttgtttcacaggtcttaccttaaattgcacatgtagctcatcagtttcaggcattcatctgttttatataagtattttaggttaaacatttccttcaaaatactgacttttggtacatttcattagttttgatatgtagtatttgtcattcttaatttctaatatcaaaaaacccattatgattttttaatctgtgagtatttaatagtgtgttttaaaatttccaaatatgcaggaattttaactcattttctcattaacctctaactcaattgcattgtgatcagaggtcatagtctgtgtgatacctatcctttgaaatttcatgaggcttgctttgtggaccagtatatgattatacatgtaaaataataaaagtacatcttcaaatcacactgtgccacttgatgggtagagcaggcaccttagagcagattattcccaactccttcttcccttccctgtgatattcctgtcattcatttcactcgtccaagtgctatatataatcagccaatacttttttacttttattgctttagttaacagttatcttttagattaaaaataagaacaacaatatattttatttattccttctcttctgctcttcttatacttatatcgatctaagtttttgatctataacatttttctcctgcctgaagaacttttttttttttataatttcttgcagggaatgtctgctggccatgaattccttcagtttttgtttgcccctttattttggggagcggggggaatgtaattcgcacacaataaaatcaccctttaaaaatatataattcagtagtttttagcatatttacaaatctgtgcaaccatcaccactatctaattccagaatatttttgtcatccccaaaacaaaccccatgcctaatagtgctcacttccaattcccccttcccctcagcccctggcaaccactattctactttctttctattgtttttttttttttttttttttgagttggaatctcactctgtttgtcaggctggagggcagtggtgcgatctccgctcactgcaagctctgcctcccaggttgacgccattctcctgcctcagcctcctgagtagctgggactacaggcgcccaccaccacgcctggctaatttttttttttgtatttttagtagagacggggtttcaccgtgttagccaggatggtcttgatctcctgacctcgtgatccaccctcctcggcctcccaaagtgctgggatcgcaggcgtgagccaccgcgcccggcctattctactttctttttatggatttgcctattctggacatttcatatacatggagtcatgcagtatatggccttttgcgtctggcttctttcacttagcatagtatttttaaggttcatccaggttttaacacatctcagtacttcattctttttttatgattgtgtaacattccattgtgtggatataccacattttatttatctactcatcatttgatgaatacaccaagaatataaccatgtctagtcagtggttaacttttttttttgttttttgagatgaagttttgctcttgttgcccaggctggagtgcaatggtgcaatctcagctcactgcaatttctgcctcccaggttcaggtgattctcctgcctcagcctcccgagtagctgggattacaggcatgcaccaccatgcccggctaattttgtatttttagtagagatggggtttctctatgttggtcatcaggctggtcggttaatatatttttaggaatatcatagcacgtcttgagagatacacacattcttgttagtgtttctcaagctgacctagcatcaccatagagaatattaatattctgattaatatttatatctgtgacctagatctggtaatgaaggaaaatatagggtacaatatacattattcaggtgatgggtatgctaaaagcctagatttcaccattatgtaatacattcatgtaaaaaactgcacttttacctcttaaatttatgcaaatttttgttaaaaaaagagattatattaattggcattatttcaggcactgttggataagaagaataaagttcttgaagtaaagaaaccccctcgcttccttcaaagaaacccaatacctcaacctcggcttccaactccaaccttggaaatgacgtccaatgtaagttggaaactttttagttgaaatgctaaattcaatatcattgtcagcttattcttaggatagtttagcttaaagcaaatctaatttagcagtgttagtttcccaagctctgacttaaatattgtctttattcttatgtatcaaacatcagacacagaaaaacaaacgagatgaaatgaaatctaaacccagtccttctcaaaaataaaaacacaatttaaaaaatctttccatgaaaaatcagcatcagaaggtagtgctcatgtatatgaaatagaaaaagaagattgagtgatgatcagctaccatagctatcttcccacatggagagatggctgatgactgttggagtcgaagaggaatgaaatgccagaggtgtcatcaagacggacttgcttctggggtgggaatgactcaaagagccctgcccagggccacatctcaccagactcaatttgagcaaagtatcagagttggttaggatttagagggctgactcagactaaacaaatccacaggaaactgttagagatgccatgatgcaaatttattactttacagagagaactataactgcctactggatcaggctgttcctcttggctggtcagcacattatctctcagtatgggacagtcctcacaagaagccagattgtattcagaaggctgatgtgtttcttggctgagggcaggtgttggtgggagaccatgctaacacctgttactacctctgatgagtggctcctgcagagggaccagaaagctcccaccagccagcggggatgtgctgctggataacattctcttttctagactttgtgcagggctttggttgacatattgtcttttttttttttttttttttttttttttttttttgagacagaatctcgttctgtcacccaggctgaagtgcagtggtgcaaccttggctcactgcaacctctgcctcctgggttcaagcgattctcctgcgtcagccttatgagtagctggaactacaggcatgtgtcaccacacccagctaatttttatagttttagtagagatggggtgttgccatgttggccaggcttgtctcaaactcttgacctcaggtgatccacctgccctggcctcccaaagtgctaggattacaggcatgagccactgtgcccagcctgacaacacatcgtctttcatgtgtgttaatgtcatcgattagactgctgttttctttttacattcaaaggaatcttaattcgatttccagaccctgctttttctgctttggacacagagtttttaagatgatttttatagatggctaaccttgtctcttatattctgattttatcagcatagctaaattcttgtgagaagtaccttactctgacatagactagctgtatttgtgtctactgatgatcaaacatgaaaaatcctattgcaaaatgatgttatatgcaatacttgttgctttaagaaatattttgctggaaaggaatatagggaaatgaaagtggtttcatttgtagggatagcatggcagggagtgaattttttgcttgtaatatgatttgttaatgatgaaaaataatgaattctaatgtaagtaacattaaaatactatatgttcaataagggcagggaccatcttttatttctctttaaatctttttggcatctagcacagtctgttttgcttgaaataagtcttcaaaagaatatttgatgcttggactactgcagttctcaagctgcttggttctccctttgttcttttaggaagaagaagaaatggaaatggctgtgatctaccttcaaaagttactccggggcagagtcgttcagaacatggtgtgtaggtccaaccgctggccctgcatttctcttttgagaataaattttttagaatgcatatgtgcttggttccttggagtgaatcccttttgcaccctgctatcctattcagctaaactcttgagttgcctacccatttccttctggtgacccatttccttctaatggcatcatttgtccaggtgggtggcacagtgtcaaggagagagacagggaggacctacctgctatttgccatggttgtaactaaggcagtatgaaactcacttcttccttggaattgttaaatccatacattttctcacctgaattttggctatttaagcattatcaaccaggtggattccctaattttccacagtcataatacaattatttgagtttgcatatgtctggcaatccctacattataaatgaaagagctaaataataaattatggttttgaacctttactatatgcccacactatttattctttgctctacatatgttgtctcatttttttttcctatccataatctcattttacaggcaagtaatctgagtctgagggagatttagttatctgccagcaaattcagctctggtcttcccgagtgtaaagccttagccagattatttgtgttgctggagcaggcacacttcacttaaaaaatggactgatataaagccccagttaattttttttcccagatagctataactcataagagattcagatatgatgagtaaatcatctggatgaacaacttgtgtttagcactgttctttactcttctttcagtattttcccaagagaaatgccacagttaaattcagacaacagattattacaaaccagggacagatttattggaaaaaaacatatggccatgaaaaatgccatcctcaggtttattagggaaggagcacaggaaatgaggggaaggttctggtttcttcagatgaccctggagttgtcatcttgtccttgagaggcattctcagaaattaagcacagctcactgaaaactaagcccattttctgcctgagaagctgaaggcacagaaaagagggctgagctctagctctgtgggacacatctgctctgtggaacccaaaaggcaggacagaacccactgttcacaagtgtctcacaagtcactgcgtgtgactcctagtgcttggcacaaagggatggtaacttgcaggtctgtctttgatttgatttgatacagatgtttgaagggaaagaaaagcgactggagttgatccaggagttgcgcacctgccacgcactacaagaagatgaaaagctggtgaaaaaagccgagaagcaagtgaccctggccttacagcggcagaggaacttgcatgagcacaaggttttcctttttttgttttcttgttactttcttgttaaattttctcccttgattttatcatcacacagcaccattataataaaaattaatgaaatgatgaaaaagaaacagccccacaatcccatcactctgtcagcatttgtgtgtgtgtgtgtgtgtgtgtgtgtgtgtgtgtgtgtgatggagtttcactctatcgcccaggctgaagtgcagtgatgcagtcgtggctcactgcaacctctgcctcacgggttcaaatgattctcctgcttcagtctcccaagctgggactacaggcatgcaccaccatgcttggctaatttccgtattcttagtagagatggggtttcgccatattggccaggctggtctcgaactcctgacctcaggtgatccgcctgcctcagcttcccaaagttctggaattcttaaataatgctgctgtagtccttaatttgattggggatgtgcccttactgatttgaatatggtgctattttttctttatttgcaaaacaataacaacaaaacaagaagaatgcattcttttcaactttaagatttttttccttccatttttttccccaaatatccagtgactattgtatttcagttagtgagggctttgtagactgaataaataacaaaagcaacatgaaaaaagtgagaaataagatttatcttaaaatattagcatttattttggagttttagagctgtcatagctcatgctggttaaactgcatattaaatgtgttactgtttcatgatatgtggtgactttcgtcatgacctcccagctgtgtgccgcctgacacagctaagaattacagctccaaaccaacaactgtaaatatttttcctattttcttccaatgtttgtctatatatgtatacacacttttaaatgttattgacatagtatagctatgctttattttactccctctcccacttttctgtaagtcaatctgaaaaagaatcaatttgcacagaatttagtgttatagggaagtaatacttaaagttaatatgaccccccctttagcaacatacataactcttgtgttatgtgggagtcgggcacaaatggtaagcagcctggaaatgaccacaactttgtttctttcacatgacagcagcaccatggatgtttgctgagcttggggaacttttggggggtgaggcagaatggggaggaagcaagccacaggctgtgagatccaacagaggaaccagagaaggaagaggagaatgtcaacactggagtccctgaatctagaagtcctagagtcctggaaaagctcagataaggagcagaatgccctggaagcgctaggccctgagactgtggatgaaaaaatgccctccttggccctttcagtttctgatcatgactttagtgggtatagctaagctaacccaggcttttcagctcatttattccatttagtggatatacatgtgagtgaaatcgtgtccgcctacagctaagggaggagttaatgggcaaagctgtcacttagccaaggactcactctgcttaccttcagctgtacttggatacaccctggatatatgcagggatctgagggagtgagcacctcatgtatagatgcagcaatgctggtctgcccccttcccccttctcttatatttctgtggaaaacagtccagaaaatgcacaacccccaattacgtaacacagtactttctgtgactacagtggagtcccctccctaaacatttcccttaatttcaaattagatggtactgcctgtgcctacccagatttcttgctgagagaagaggctaaacatgaacaggatttctagccacctcaggattttcaaggttgcacctgaccctgagtgagggagcttatgctccctggagacaaggagagaatctatttgtgatctctgggctgagtatctactgtttatgaatggaaggagtagtgagatgctcttagctttgccctttttttccatctctccctattatataagtaaagttgaactttgtggttagaaagtgtgtgtgggctaggaggcaggtgaggatgaagatgggtggtgttggggccaacaaccacacttgactgatgcttttacccatagccccatggcctctgagaactgagtattccctcctttcatacagaaaccaggaaggaagctgagcatagagggagaactgtcactgagaaggtggcatgtgactggaagatgaacccttttcccttacaagcaaggataggagaggaaaggggatgaagttgcaaagtcatcttaaacacttttcttctccatatgtcaaagccaggacacagggattcataaataggcactgtagctgacttctggcagagagcacaatgggtccctaattttgcctcagtgattagatggacatttggtctgtttcctgtgctttttttttttttttttctgagatggagtctcactctgtcacccaggctggagtgcagtggcgccctctgcctcctgggcgcaggcaattctcctgcctcaggctcccgagtagctgggattacaggcacgcaccaccacgactggctaatttttgtatttttagtaaagacggggtttctccatattggccaggctggtctcgaactcctgacctcaggtgatccacccgcctcagcctcccaaagtgctgggattacaggcctgagccaccatgcccagccattcctgtgctatttcgaatattgttgttaatgacttcaaagttattaaaaaagtaaaaagtaccaaggttttctactttcacgttattcaagatcttaactcctaacttgtgtgaaaggaaagatattgaaaaattaactgatatcatgagtgaatttctaggagattcaatttgattaaactccaatattatctttaataaaaaacttgacatttcccttcatatctgagaagacacactttaccttgttgataaaattgaaagaaaaaaaacccattctccatggtcactaacagaaacgtcttgctaaatcctcttgcttatttgagggctgtggtccatcagtgactgaccagacaatcgactttctcgtgcctcagttttcctcataagaacttgggttggagccaattgagaggtaatattcccagtaaaaattaaatgcattctgaaagtgaattgactgccaagagttttgagtaatccagcacttcttctaataatcaccactcataatggaatttgtgtccttaaagttatgttattcttttcaaggtgtcactggttgaaaaccatttggccggactggaaggaagggcactagcagacatgtttgacttcctgtccaaagagctggtgagactgcaggaggagaggaggatccatgcctttgtcatgctggctgagcgccagcggcgggtacgagaggctgaagagagtggtcggcgccaggtggaaaaacagcgcctgcgggaggaggacgagatatttaaggaggcaagtaggggcagctgggtgtgtggaagctgcctagaaggagccaagtcaaaccaaaggaagctcatgacataaaatggcatttggcttttgtttatgcattgagttcctactgtatgccaggcactctacagaggcactgtgggaaactttggaggaaaaaacccagacacgatcccgtctctcctaaagcttaaataacacataatacgcacgtgtatagaattagaaactgtaatgagttccatgaaggaaacaaatagggcccagagacacattttaagccagttacttcacttgctgtgtggagcacaggctggagggaggacagagggggaacaaggcggccaggaaggagctgttgaagtagtgaaggccagagtgagagacaggaagtcgagtattacatccagtttcgggcttaagcagctggaagatgatggtattatttcgtgaggtaggaaagttgagagaggaataagcttaggggcaggggaggaatcaggaaatcagtttatatttcgtttgggacatctaagcagaggtattgtttcagtagatggatctacaagatggaatttagaaatgagggtttggccgaagatgtaaatttggaagttggtgaccagcttctagcctcctactaatctcaacacacttttcttcaaaaacagtgactgagatttagaaattattggcaaatcagaacttgccatcctttacctaatatcactaaggaagaaccagctggggatgagaataagaagaaatggaacagaggagctactatacacaaaagcagagaaaggaaaaagctggtaaaaaagcttcttaggaagataccttctaaatgggaatgatgtcagaaaacatcagctctgtctagcaagggcaagaaagggttaatatagcctttctagcctgatttaagaaccacttaggtaaaaaatgtactcagctatggacccacagattcaaatatcatccatatgttaattctcaaccttcctaattaaaatatagtgactattttccatcctacttccccagcctccattcagattctcttgaagagaaatatgcttgcacataaattataaaccagaaatgtaatatttaataaatttccaaaatatgcatctagatagtgagaaacacagatataaagtcatcgactcatctttaaatacatataaattttgcaggcacatacatgaggacatatttacaaatataatctggtgtgcacaacattagcaagacatagaggaacacacatagccacacttttccttattcacatacatacacgcacaaacgtctccagaaatttacacatttataaagatatacataaacacacaggtacatatacagctatggatggaccatagtaaactttccacctctctactattacgtgactgagctaattgatccatatagatccaacttgcttcctgaataagagggtgggctctatgagagcatgaatattgtatattccctttgtgccttgcacaacacagtgtagatccctgtaactaataggcattcagcagatatattttggttggttagttgtttggttgatactgtattaaactggccattgagactctcccatagagaaggcatagggattgaaggttgatgttttacacataggtgtacagtatcatatactcagaattgtgccaaagtgccaatccacaaacaggtactgaattgttactgagtcccaggcattatctcagatacaaagctatatttagacatgaaacagaaaaatgccctacctctaaaaagctgataatctgttgaggagacagcatacatatacaggcaaaactaagtatgccacagttgatgcttaatctttctatatacatacacctgtaaagcgggcaaaactaaactactttgtttatggttacatacctaggtagcaaaattatagagaaaagaaagtgtttactatgaaagtgggaaggtgctgtggtaaaggaagaaaccatggtggccttctgagatactggcagttactataatacatggcttctgactttaccctaattcattacactgtacatttatgtgctctgtactttttattttgttttatttttctaatctctgagtttgcttgcaatgcacttttaaaatctgtatcctatttcatgatttcaagtaaactttaaaaagaagcagtcaagggctggtatgatagttcaataaattcattagagacccaggatccttctagctttctgctcttctgctcctaggtcgtaggccttctggcaatttaagatgattgctggtattccagcattatgtcctcatgaaaggagaaatgaagagagaaaaaaggaagccaggtctttccctttaagaatcctttctttggtcagaacgtggtcatatgggcaatccagctcctgtgggtgctgggaaatgtagtctttattctaggcacctgtttccctagctaaaatccaggggttctattatgtaagaggaaggagagaaaggacactgcagaatacctcctagtctgtgctacagttagatagtttgaccaagtcacgttgctggtaagaacaaagccaggatttgaaccagcgttattgactctgaagcccataatccttcagcagtgctgtcttgcctgcctgcccaataagatccataattctgaaatgggctaaatgggtgtgggctgcccagagtgagtaggtaggtggatgagaaacagactgatgagatgctaaagaaaatgaatgattagtgaagggactgttgacttattaaatgaaatatatgagctagaaaaagttaaccaatgtttgtgtatttttcttgtgttgtttacaacagcatacctgttttagtgagggtattattgttttttgcaggtggttaaagttcaccatagtactataagctcctacctagaagacataatactgaataccgaagcgaatactgcagaagaacaagccagggcagaaatagagaagatggctgagaaaatcaatgacattgcttatgaaatggaaagccggtgtgtatcaagagaacagattgtagaatggacagcccatttgctggtactcatatatattttttcaagagcttacaatttcaccaccaagtagaaacaaataactcatacttcagcgtccattgttttattaacattaactcttgagaagccaatatgtgtatgcctccgtatgtattctcagttatcctctgcaatctggattactctcattacttactttaagaatactcggaagcatgaaaacaatgtgaatacgtgtgtgcaacattactgggacttcatcccaaggttgctggcttctatgtataagctgtgtttccaacattcccttcctggcaggcagggtaactgaaggacagggtcaaatccaaatttttttgtggagttaaacaaacttgccaggaatgtgatatttcagatcacttaatcaaggaaaaggtgatggtggggtttgaatggagttgcttacacagcaggaaagcataaatcagcagctcaagtgaaaaaaccaaagaaataattcaatttgttttatattttttagccgaacctatcttcagtcagaggagattgttgctgagttggtttatagttttctgatcccagaggtgcaaaaatactttgtcaaagaaaaaggtaagccaatgtaaatgctttactttaggattttttaaagatgtaaattattttcaatatcccagagatttaaaattaaacagagggatgaggaaatttctaaaggaggatcactgagttttcttatttcagagcttgtcaggttctcttcatgctgcctgattctagaatataatcaactctagtacagatgggttgtagttctaataagagtgacagtatcaaaatccaaaccttgtttaaaaggatgttcccaagttttcagaagagctgtatttttttatttatttttttaaaaagcataaaacagatattgagcatataaaagattttcacattgtagcagcctttcagaggcaggacacgtgaaccgtgaatgttaaaaaggaagggtgctagaaaggtctaagtctaccctgctgctctgcctgtaccccaaatagcttatttctgctggaactccatccaagtataaatatcctaatttatcatttgtcaccggtggcatgtttttaaagattgatgcttttagtcaatagagaaagagaaaatactatcttaaacagaaaaataagattcttccatagctctgaggctgctgatggcaggcttgatcctagacagaggggtgcaaccaggagaagaccagtatttaagtgaaatagcagctcagaagtattgaaaattataccggggaattccagatgggcttaagcagaaaaatgcttaacatttcaatttgctcaatcagggataaagaaatggtggagttctaacacatttggagaggacaaagaaatacctgatttttccattgcatggttgtagtgtaatttttaaaccagtaccccctaaggataagcatttagtttgtttccagtttgttttcctgttactaacagtgcttcaatcaatatattttacacatatcctgaccatgcttctgagagtacattcttaacagtgcaattgctgggatataaggtatatgtattttacattttgatagatagtaccaaatttccttacaaaaagattgttctaccaatttgatattaccaaattgccccacaaaatgattgttgacttgcatcaatagtgtatgatagtgcttatacaaaaaattaattttcagatcaagtaatatatttctgtgtcacattatgttataaaaggaccttatgttttctaggaccttaagaaaatatgcaactctgttccacttctcctgagttcaaagtgaggccagcctgcttcaaagccattacacccttggttgaattccaccctaggattgaaagagaggaggaaaactgggtttaatatttactagtttgtggccaggtgcagtggctgaagtctgtaatcccagcactttgggagtctggggcgggaagatcacttgaatccaggagttgagaccagcctgggtaacacagggagacccagttactacaaaaaatattttaaaattagctaggtgtggtggtatgcacctgtagtcccaactactcaggagactgaagtgggaggatcacttgagtgcaggaggtggaggctgcagtgagccgagattgtgccactgcattccagcctgaacacagaatgagaccctgtctaaaaaaaaaaagaaaatttactagtttgtgatcccctctcccatgttgggagtctgagttgaggatttggaggaagacttgagctaacggaatccagtggaacttatctatgggcaagttgaatgagtccttagcctcttccctttatatttttgccaaatcaaaaaagccatatgaacagggagcacactaggacctttttctctctgttcaaatgagaaccatatgtattatatatacactctttacccaaaattaagatgataatatatacagacgattttgaggtatatcactttttgaaaagccaatggatcagaaagaccttaaagatacctgtatatagatataaagtaatagtaactgccaaattttaaatgcatgctaagttccaagaagttcactgaacatttttaaatgtacactatctcaatttctttcaagagttgtaggtatattctcatttttcacttaatggaaattagctcttagagacatatgacttgcaaatttgaaccatggtctatgtgactccaaagcccccactttttcaaccatattactgtgaagtgctaaaaactgctgagtgaattaccctatctaaactacctgatacccaaacagcaaagaatccacagtacttcttgcggtcctttactagctatttgactttatgtaaattacctaatatctctgtgtccatgtttcttcttctgagaatgcggatattaaaatactatcttctaggaggattaaatgaataattacatgtgaactgcttaaaacagtacctggcacaaagtaaggacaaatgctaactgttaacatcatcatcatcactactcctttccaagggcttaggtgcttaccctgatagtgaatattcttagaatttggagctaggactatgttctaaagccatgagctcataaactcatcatcaatcagtaagtcccttccacattaagaactaaggctcaaagagaagtataagactaggtctttatatttgtaagttacttacactctagatatcaaacgaaatgtaactcacatgaagtgcttcaatgctgaataggttggtacaaactcaagtgcggtaagtggtaaatctgggctgatgtagtcagaggagacttcctggaggatcttggacatgagctttccaggttttagagtgcaggcattccagatgagggaaactgctgaggagtggaatggaggcaagcctggtggaaaggagtatgactgggctgaaccagagagtgggaacagagggagcagaaagaaattagatttgggttgggttttacctttaatttgcaaaattatttctatcatgactctcttgaaacatttgggaatggttttgttcagactttcagaatgaaaatttttctattactttggcacagtgaggaacgcacagcggaaacatattcttgcagcccatcagatcatccacagttacacggaaagcatggttcaaaagaaattaactgagggagagcaagatgaggcctcaaatgctgccatgttacttgagaaagaaactcaaaatgagaacaacagctaaggtgagtttgattttccaccaggaaaaaaagcagagaaaggaagaaaagcggcattgttcagctttgtgctgtgctcaaacaatcataatgtgaagattgctgtttaagaaatggaggacttccacttaaattggcacatttcctctagtttatgttatctactgttgagattattagaaaattagagttgatattacagcaattagactcttgtgatacaaaaaagaggactctaaattatttttatgggttcttttagcatgtgtgtacctcgtcaaatgaagctatagaatgtgtcagtgttacatataaacaatcttgttcttatggaagtagacaaggtatgccctaatgcattgtgctagctgtaagcatggcatgagacacagagcctgcccaattctagctcagacaccttctgcagtgcccacaaggggttggtcttgggctcaactaaaggctgtcatactcatgagactaatacagaccatatttggcatgaatgtacttagaaaaatataagacaggaaacagcttccagcaaggcaacatcagacatttctcttcctgtaggagcccttgccatacccatgcagaacacatagctgttttctttagtccttagtttacggagtgcagatacaatacaaggaaaagaggttcacaccgggtgggtacaggagctgccctggcgtaaaacttcacaccccaggggctggaatctcttgtaataattccataggcatagcttccagggtccccaccatggatttgcccagctacaaaagtcaacatactcacagaaactcaaagctgtggttttctattaggtatacattcctcccagttcagatggaatttaccaatcaggggtcatttttaagtagttcaaattgcttagtaacacagttgacacatatcaccttatcaagttactaggagaatagagctagggagtcaactgaaagtaaaattctcatgagaaggggaatggagtgaactttttgcttatactttctccctcaacccttttgtggtagaggcacatctgctgctgttttgccctgaaggtataccaaccatcaggttggggagagtactggggctagggagaaattttagtttggcattcagaagttttgtatattgtccagctctgccaccaattgtataatcttacacaaataatttctctacttcagtccttggtccaatagaatggaatcttaagtctcaatcaaaaggaatcatggaaggagggttgagatgagagggaaggtaagaaatattgcagagagaaagctaataagtgactcttaaatatcaaactgtggctgtaaattacagcagaaaaacttttgactttaatagtaaaataacctctgaaataattgaaaatataaaacatctattacatgtaatgttatatattgtctataaaatgtaaattcaaggaccaaagcatttggctaccttattattgtgataaaagcaagccttaaggttggggtagtcatttttctgacatgcaaatttaataagattaataatttacacaatttgcattgaatgcatctgcctttacttctgattatggtacctactctatgacatccatagtgacctgtgaaatcaagccagaggagaaaaaaatcatcttctatttatacttagtgaaagtaaaatatatttcattaaagcctatgtaaagcatatatgataattataaaatctagttgcagaaaagtctagttgtcaggctaactacagacactcaacaaagatgaccaaccaataaattaaatggttggaacatgaagctaagctgtccccaaagtatatcctccctcttccttcttgcagagggaagcagagaatgacagatgtgagattattcaatgatgtctagggaaaggggcagtagtcatgggccactgatttaaaatacatatttaaaaatacatatttttaattagcttgaacagagagctaataaagtagtgaagaatttctgggccaagatctaggagaagatagaaatttagagggttgggtctggcatttggagctacttttttcctggaagaatatgacaattctagaaaatgtggctgaaaggctgaggagtatttttaaaagctttgcaaaacaagggggacaaaaaacttgagtcaaggttggggccctggtaaaccttcttcatttgggtagggactctaaaagtctatgccctagtggtaagggttaactggaagtaaactatccctggcatatgatatagtttagcttctaatcatctgagtgattttaaaaatctcaatcccagaaattgaacttaacgagatccttggtttctattgcttcaaggaacctgccagaaataaaatgtaaattctctttacagaaagttaacattattctagacctctattttcacaatttctagaacacaatcaagaatattcaggtacgtgaggagacatgacagtctgaacaagtggcaaaacaatagatgatagaaacagacctaaaaggatctaaaatattggaatcgttagacccagactttattttttccataagttattggggtataggtggtatttggttgcatgagtaagttctttagtggtgatttgtgagattttggtacacccatcaccagagcagtatacactgcaccatatttatagtcttttatccctcatccccttcccactcttccccccaagtccgcacagtccattgtatcattcttatgcctttgtgattagacacagtctttaaaataactatgttgactactgtggacttctatcctccagaactatgggaaaatacatttctgttgtttaagccatctagtctatggtgtttggttatggcagccccagctgactaagccagattttggtaccaggagttgggtactactgtaacaaatacctaaacatgtgggagtggccttgccactggttatgggtagaagctggaagagttttgaggtacatactatatatatggacattgagggtgattctggtgagttgtcaggtggaaatatggaatatgttattagaaactagaggaaaggtgacccttattataaaatggcaaagaccttgactgaactgtgttctagtgttttatggaaggaagaacttgcaagcaatgaaattggatatttagctgaggatatttctaagcaaagtgttaaaggagcaacttggttcctcctgactgcttatcataaaatgtgaatggcaagagatgaattgaagaaggaaatgttaagcaaaaagaaatcagaatgtgaagatttggaaaattcttagcctatttatattggaaaaaacgagaaagctctttccaatgtgaatgctaagggtgggttaacagacatttgataagtgtatgggatcatatgagcagaaacattgcaggatgaagttaaggaagcctattgattggacttcttgaattagacaggatgggatgatagaactattcagctgcaaacatgcactattcttcaagaagaaggaaaaatgattccacaggagatccagagatcatcagggccattgtcccagtttcaacagccaggtggctttcaccatgagctttggaagaaggaccacccagtggaccccagctcagcagagctatggggtgggaccctgggtcagcagagctacagggacaggacacttacctagagccatggggatggggcattgtagagtcaaaggggcagagccatgggaatgatgttgccaccccagtgggcttagaaagcaagacactaagccaaagaagactatactcaagaattaagatccagtggaatttgccttgccaggtcgtggacttgcttaggatccatcacccatttttttcttctgatttttcccttttggaaggaaatatgtctcctatgcctctcccaccatagcattttggaagcacatagtgtggctggtttcacaggctcatagctggagaataattttgcctcaggacaagtcatatcttgagtctcacccgtacttcatttggataatatttatgagactttgaactttagactttagagttgacatgggaatgagttaagatttttggtattgttggtatagaatgaatgtactttgcatgcaagaagaacatgaattctacctggggtagaatgcttgtggattgaaatgtgtccttgaaaatgcgtatgttgaagctataacccccaatgtggtatttggagacaggaccttagggagagaattaggtttagagaaggtaatgagggaagaaccctcatgatggggttattgcttttatgagaagagacatcacagtgcttctcctctccttcttccactccccctctgccattctccctctctctctcttcctttctccctctcttcctccatcttcaatgtgaagacacagtaagaaggtggccatctagatgacaggaagagaactctcaaccaaaactaaccatgctgtcaccttgatcttggacttgtagcctctagaactgtgagaaaagaaatttctgctgtaagctatccaatctatggtattttgttatgacagcctgagctaagacacttactctgttcacagggtaaatgccaatattgaaaatttcaagagaactggacataataaaaatgatatagcagatttgaagaaaatagaaattccagaatttaaaaatacagtagcaaaagtgagaaactcagtgaatctctcctgagagatatttagaaagaagcacagaaagacaaaaggatagaaattacagaagagagagaaggatagatttagaatagcttaatgatttagaaaaggagaaagagtgagtaggcatggaccactgattgaagaaatttcactactaaaggaaggaataatatgttgggagatcatatggaatacgaattttccaaaaacgataaaagacttgttttcaagaagacttcttaaccctaagcagaataaataaaaagaaaacgatacctagatacaccttagaatactaatactgctgaaagccaaaaagaaaaagaaaaacctttaaaagcattcagagaaaaacgataaattaccttcataagagcaataattaagctgacagttgacttctcatcagaaacaatgaaagccaaaaagatggaatgatatgttcaatatattgaaatagtaaaataaagtaggattctaggcaaacatattcttcatgcaaacatattcttcaagaatggcaacgaaagacattttcagacaaatgaaactaataaaatttgtcactaggagatctgcaacacaagaaattattaaagggtactttttaagcagaagaaaaattatcccagttggaaggttggaaataaatttaaggacaggtatgtggattggcttattgactgcataaaaaaattataagaaacagcaataataggagcaatgcagttataaaacaaaagagtaatatataagtcagaagagggctaaatggattaaatttttctaaggcacttgcattgtttaggaggaggataaaagtataagttgacattgataactcaatgatccatgacaactcaaggatacattttgtaacctctagggtaactctgaaaggataataaagagatatatgacatctaagctaacagaagaaaatgggactaaattttcaaaacactcaatacaaaaagtggatagaaaggagaaaaaaggaaacagaaccaatagaaagcactgaataaaatggtagatgcaaaccaaattttatcactgactacattaaatgtaaatagacaaaatattccaagtaaagtcagaatttaccagactgaataaaaatcatactaaattatatgctgcttgcaggaagcctatataaaatctaaatatacaaatggttgtaagttaaaagattgaaaaagataccataaaaacaccacccatagaaaagcagatatagcaatattcatatcaaagaaaactttaaggcagaaagtattagagaaaaagagggacatgccataaagataaaggtctaatttattgggaagatataatgtcacaatttaaatatacttaatagcacggcctccccctaaatgtagcaaaatttaacagaactgcctggagaaatagacaaatccacaataattctgggaaattttaatctttatcaggaactaacaagcaagtggagagaaaaaacatttaaaaatgaaatatttggctgggtgcagtggctcacgtctgtaatcccagcaatttgggaggccgaggcaggtggaccagttcagctcaggagttcgcaaccagcctggacaacatggtgaagccgtgtctctaccaaaaattaaaaaaaaattagccaggcatggtggtgtgtgcctgtagtcccagctattcgggaagctgaggcaggaggattgcttgagcccaggaggcagaggttgcagtgagctgagatcatgccactgcacaccagcctgagtgacagagcaagaccttgtctcaataataataaaaataaaattaaaatggaatattttagatacataatttttaaaaacttggcctaatggacatttatagaatattacgcccaacaactacagaatgcatattcttgccaagggcagagggacattaccaggggaaagagaaaccagaggagctgtgtgggctggcctgatggattggggtacagaggagcccccagagtaaggccaaattttcccatataatgttagctttaggttttcggtagatactgtttttctgcttgagaaatgtttgaatatctcttgttatttaatgagttatgtcagtaataaaattcactcagttccatggacttaaccattgacacttctataattttttgttttttatgggtttttatatatgtgtgtagtttgtttgtttggttggttggttggtttttggtcagaaagagatgctgaatattctgacttgcaccatcatactgacattcagtgattcagagtggtaaagtttcagtgtgacttttttccagctcagggccaagattgagatttttctaagtaagaacaccatcctcagctactgttacagaacactgaatggctttggaaattggctattgctgcagacttggtaatattttttaatgaatctatcctaatgttgcaaggcaagcaaaacttacatgcagagcttatgctatagtaaagtcccttcattggcaactaacattatttgaatcccaaataatgtatttcctatgctatgaaaagttaaaacaagaaggaagatctccattcctacatatatttgcattggatatattttctgagcctaaactacttttctagtagcatttttggaccttgaaacaagtgcaaaggaaatttcaaaattatttatctgcaatggaagcatgttcatcttaccttcaagtggaagtagttaatctgtattgtaatgacctgctaaaaagaaaatatcaagagaagaatctaatagaattctataaatgccttccaagcaataaatatggatatttatataaaagtatataattgtggatggataccagtattggccatactgttctgaatgaaaagacattttcaaagatgagatagggatgagatgagatagggaaaaatctcattttcaaagatgaaatgagaaagaggaaaatctaattacacatcactattaataaatgaacatttgcaatcaatttcaatgacttgaaccgaaattaagcaaaatgttattcccccaaataagaattccattcctttcattaagataactatattacagaaaactatagtcaattattagtagtgtattttgaattttataaaaaatgttgtgaaaatttgttttctcttttgttaaatgagtatccttgattttgtcatttggctcacaaaacctaaaatatttactattaagcccttttcagaaaaagtttatcattccttactctacagcaattacaataaagtagaactaaatataacacatggaagaatctcacaaatatgataagtaccataataagccaaatccaaaaataatccacagtatgaatttatttatataaagttcaaaaccaacagcattaaactatagtgtttaggaatgcatacttagaaagttaaggtgtaacaaaatgcaagaaagtgactactgtaaaaataaaataaaaatcagaatagtgattacctttaggaggtaaagagaggattgtgattgggaaggggtaaatgggagcttatggaatactatttcctgacctgtgtgatatttacacagatgagtactgtacattaatttattaggctgcacattgcttttaggtactttcctatatgtgtcatattctacagttgaaagtaatacaaaaacatatgaaagtataaaactcattggtaaaagtaagtacacggtcaaattcagaatattctaatactgtaatgatggtgtgtaaatcactttttagtatgaaggttaaaagacaaaactattaaaaataatatctacaataatttgttaagggatacacagcataaaaagatgtaaattatgaaattgaaaacacacgtgttgaggagggtggataaaaagtgtagagttcttgcatgcaatcaaatttaagttgttgccagtttaaaatagcctattgtaactataaggtgttttatatattcctcatggtaagtacaaaacaaaaaacctatattaaatacacaaaaggtgaagagtaagaaatcaaggcatggcgctagagaaagtcacctaattacaaaggaatacagcaagagaggaagaaaggaataaggacctacaaaacaaccataaaacaatgaaccagatgatagtagtaagtctttatcaataattaccttgaatgtaattagattaaattctccaattcaaagacatagagtggctgagtggataaaaacaaacaaatgagacctaactatgtccagcctacaagagtctcacttcacagtttaaggactcacatagactgaaagtgaaaggatgaaaaaagatactcaatgcaaatggaaaccaaaatagaacaagtgtagctaaacttacatcagataaaataggttttaagtaaaaaactataaaatgagaccaaaaaggtcattgtgtggtgataaaggggtcgattcatcaagaggctttaacaattataaatatatgtgcactcaacattggagcccctaaatatataaaacaaatattaatagatatggagggagagctagactgtaatacagtaatagtggggacctccagtatcccactttcagcaatgaacagaacatctagacaaaaaatcaatagagaaacatcagacttacactacaccttagaccaaatggacctaacagacatatatagaatattccatccagcagcagcagaatacacattcttctcaaatacacacagaacattctccaagactgatgactgataataagcctaacaaacttaagaagattgaaattatagccagtattttttccaaccactgtggtatataaaatagaaatcagtaacaggagggatttcagaaaattcagaattacatggaaattaaacaacatggtcctgaacaacaagaagtcaaagaagaaatgaaaagggaaattaaaaaaaaaaccttgaggcaaatgaaaatggaaacacaagacatagttatgggatgcaacaaaagcagttctaagagggaaatttatagcaatatgtgcttgcatcgaaaaagaagaaagatctcaagtaaacaacgtaatattacacctcaaagaactaaaaaaagaacaacaaatgaaacccaaaattagtagaaggaaagaaataataaagattagaccagaaataagtgaaatagaaactagaaaaataatagaaaagatcaacaaaactaaaattcggtattttgaaaagataaaattgacaaacctttaactagactacttaaggccaaagagggaagacttaaggaaaatcagaagtgaaagaggagacattacaactgataccacagaaatgcaaaagataagactactataaacaattatataccaacaatttggacaatctagaagaaatggatgtctagacacatgcaacctatcaagattgaaccatgaagaaaatagaaaatcagaatagaccaataataagtaagaagattgaatcagtaatgaaaagactctcatcaaagaaaatcccaggcaggacccaatggcttcactgctgaatcctaccaaatgtttaaatttcagtcttccaaaaaaattgaagaggagggaatacttccaaactcattttacaaggttagcattactcttgtttcaaaactagacaaggatactacaagaaagaaaaattacaggccaatatccctgattaacgtggatgcaaaaattctcaaaaaaagtaacaaactaaattcaacaaattaaaaggatctttcactatgatcaagtgggattcatcctacagatgcaagaatggctcaacatacacaaatctataaatgtgatataccatattaacagaataaaggacaaaaatcacatgatcttatcaatagattcagaaaaaaaatttgacaaattcaatattctttcatgacaaaaaaaactcttaacagattcattatagaacaaatgtacctcaacatagtaaagtccatatatgacaaacccacaactaacatcattctcaacagtaaaaagttgaagccttttcttctatgatcagaaacagacaaggatgctccactcttgctacttctattcaacatagtactggaagtctcagccagcacagttgggcaagagaaagaaataaaaggcacccaaattggaaaggaagaagttaaattgtttttctttgcaggtgacatggtcttatatatagaaaaccctaaagactccaacaaaaaaactaatagaaatgataaagtaattaatttacgggtacaaaatcaacatacaaaaatcagtagcatttctatacattaacaacaaactatacaaaaaagaaatcaagaaaacaatcccatttataatagctacaaggaaaaaaataaaatacttacttaggagtaaattgaatcaaggagacctgtacattgaaaactatcaaacattgatgaaagaaattaaagaagacacaattaaatgaaaagatatcctgtgttcatggattggaagaattaatattgtttaaacatccatgctacttaaagcaatctacagattcaatgcaatctctatcaaaattccaatgacatttttcacagaaatagaaaaggcaatcctaaaattcatatggaaccatgaaagaccccaaatagctaaaacaatcttgaagcaaaaagaacaaagccatcacactacctgacttaaaaatctactgcaaagctatgctaatcaaaacagcatggtactacacacacagaccaatggaatgtaatagagagcccagaaatgcacccacagatttgtggtcaattgatttttgacagaggtgccaagaacacacaatgggaaaaggacagtcttttcaataaatgatgctgagaaaactggatatctacatacagaagaatgaaattagaaccttttctccacaccatattcaaaacccaactcaaaatggattaaatacttaagcataagtcctgatactgtaaaactgcgagaagaaaacataagggaaaagctcctaacattggtctggatggtgatcttttggatatgactcaaaagcacaggcaacaaaagtgaaaatagacaaaagagattacatctaactaaaaagtttcagcacagcaaaaaacaataaacagagtgaagagacaacctgctaagtgggagaaaatatgtacaaaccatacatctggtaagaggttaatattcaaaatatgtgaggaactcaaacaactcattagcaagaaaataaataacccaattaaaaaatgggcaaaggacctgaatagacatttctcaaaagaagacacatacaaatggccaacagatacatgaaaaaaatgcccaacattactaatcgttcgagaaatgcaaacaaaagccacaatgtgatatcacctcatactgttagaatggctattatcaaaaagacaaaaagtaagtgttgaggaggatgtgaagaaaagagaaccgttgcacattgttggtgggaatgtaaattagtacagccattgtggaaaacattatggaggtcctcaaaaaataaaaaatagaactaccatatgatccagcaattccacaactgggtgtatatccaaaggtaatgaaatcagtgtgtgaaagagatatctgcactcccatgttcactgcagcattaatcacaatagccaagatttgaaatcaacctaagtgtccaccaacagatgatggtatacacacaattgaatactattcagccttaaaaaaaaaaagaaggaaatcctgtcatttgcagcaacatgtctgaacctggagggcattatgctaggtgaaataagccaggcacagaaataccagcataatgccatgaaccaggtgtaatgcatccacacacatacacatatgctatcacttgcatgtagagtagaaaaaagttgaattcatagaagtaaagagtagaatgttggttgccagaagctagtgtggtagggagatgttggtcaaaggatacaaaatttctgttaggaagagtaagttcaagggatgcattgtaaaaccgtggtgactatatttaataacaatgtgttatattttgaaaatagcaaagagagattttaagcaccctttccacaaaaaatgaaaagtatatgaagtagtgcatatgttaattagcttgactgagccattctacaacgtgcacgtatttcaaaccatcatgctgtacctgacaaatatatataatctttctttgtcagtttaaagtaaataaatgaaatagtaaaggatgttggcagtaagtcaaagtaaaatggaaagagaatcagaaacggtatttatgacctccagtgtctacatatcaacttttcccaaacaattgttccatggataactgctcttcaggacattcataagcagggctgctcctggtatttgcaagacccaggtcaagaggatgaattgaagcatcatatcatatgaaaatatataaagttgtaaattaggctaacatactgttatataaaatttattctacccacctactttcacaaacatatctttgagatgataacattgaaaaacgggtaagcagctatgggctttatgtaattgaaagatggcaagaaccaaagatggtaagcttagttattattgtacatgtctgactattctgtttatggtccagtaatatttgggcaagtaatgaaataaaggcatacatggttttttaaaagttagaaatacatatgtatatatacaaacaaatacatatatatatatacattatgcctgcagtatacagagaatatttctggaaaggtcaataagaagttggtaggtagctgttgccaggcatggaaactggggactggagttcacaccaggggaaaagagatttacctttctcatgttgacattcttttgtatttttatttttttatgatgtatgtatacaacccagttaatgtacagatttttttaagtgctagaatttggaaactgacacactgtgaagtaagaaacatctggatccataaggcttataaatagcagagctgggatatgtgtggggctgtctgagttcaaagctagggctcagacacactgtatcacaggaattttttgcatgtattgatctgataatgtttctaaaagatgacataatcataaacatttgttttgctcttttttacagattgtgatttttttgtaaaagaagctgtacgaatcatcataaataattccaatagtctgcacttctcccaaggtgtgcactgctcataaacttgccagtgtgtgattcatgagaaaggagatttattttccttaaacatccaataatttaaaatgattttcaataataataatcaaatgaaaaagcttcattctcttcagtgtcttctagatgccctacttaaagagaacattttcttatgtctcatttcaatattttgttaactatgaggatgtgctggtttgttgaatcaaacaaaaggaaatgttgtggaatatttttccaagtagttttggttcactattcacaggacattggcattatctactaaggctgaaaatgtgcatattccatgactcaggattttatctcctagatatatattcaacagaaatgcatgagtatgtgcaccaacaggcatgacaaaaatatttatagtagtggtgttcacaatagtcccaaactggaaacccaagtgtccatctccatcggaacagaaaactatactttggtctgcttctacagtggcacatcaacccacctttgagctttagatctaagaagtgtgttcatgcaacagccatagagatggtgctattgaaaggcaatctgcccatcctgtgtattgacaagcatcaggattccaggaggattcttcctgattcaaagactgtcaaataggaaaaaagaaaacagtaaatgaacaaaaacatcaacatggagtccaagtaatgaatttatagaggaaaatgtatgctactctgaaaacaaagcttatgttagagaatatcttactgtaagaaacaaggaaaattgcagaaacatttgctgagtgtttttaataggagtcaaaaagaaagggtcttttcagaaactgaagtaggaaataataacagacaaggtcaaaaaatagatgcaggctgaaaagaaaaggaagtgggctaagatgggaaaaatataaaaagatttaaaatccagcaacaaaatttacacattcatttggatgcagtgaaaagggcagaaataccacagcagagaataaaattgataatgttggcaacacatttattaagtgatccaacatgggatgggaaggaatgggcaaagagattaaaatgacagaagttagctgtagatgacctatcccacagcaatcggagttcttgaagaagaaaccagaacaaataaaatagaaacaataatcagagtttaataattaattttctgagtttttttttaaaaaaactaattatacaaacttgaaagggttcaccttgccctagcaaaactaggattgggacacctttttttccccctgaggatcactgacaaaaaacactgcaccagtaaggaagcaactaaattttgttttgttctttgaaaaaggctaacctgagctaggtaaaggttatatcattcacttttgaaataaaccatcgagaacacaaaatgacaagtgagttaggttgggctgatgggatagaaggtgggaggggaatgctatacagctgggaacagcagactttctctgaagggccagatggtaactacattagggtttgcgggtctgatggtcgccatcataactgcatactcaactctgccgttgtagggtaagagcagcactcgatgacacagaaatgaatgcacatgactgtgttccagtaaaattttattttaattaaaatcaattcatgtttgaaaaaggatttaaagtagcttctaataaaggacatgtgtaatgaaacttaaaatatgatattttctttaaaaatctttatccttatgtagacttctaaaactatgttttgcatttagacagtcaaggaaaatacaagttgttatacaattctcattgactaattgaagtttactaggagaggaaaactttttcttgataccggcaatcttttacttataatggcttgagttaaaatgctccaacttttctaatttttgcttttgaaaataaaacacctatagtgacaataaaaacacacatttaaagccaagtggtcatagtgactggagccatgtagtgaattggggctagactagtacgatcaatagcgatacaaaatcacaatgaactgtctgaggcagaaaactttttgtatggatgcgtaatcagatatagtgaatcattgtaaagagaggcagtgctttagcttgaggcaaggtaaaatccaaaaggaaagtgtgcagtgtgggtaaaggatctctttaggatgcgaaactgttagcacaaaattgttgggaattctaagttcctgaagtgcagaactcccagacaaattatgttagagcctgattgttagttcaggaggagcttccactgctaactcccatcctcctactcagttctaggccactggtacccacttgagggtagagttgtatttacaaatacttggagtgattttatgcaacaaactgcacagaggattatagactcagttaataggggagtggagaatgccagcaagcccctgagttagagtgaatggccttcaactgtgcttaccaattgtggaacaaaagccagctagaaccctagcaatatagtagggttatgggatctttggagtgttgcttttctggctggatacctccgtggacagtggggcctttgcctgagttcttgtcctgtgtccaggaagaatgaggtatgcagacaagtggagggtgagcaagatgaagagaagctttattgagtgttacaacagctcagaggagacccacagtgggtggcttctctttgtaggcaggtcatctggtcgagtgttcagctctcagcaaaaaggaggcaatggagtgggtggctcctctctgcaggcaggtcatcaggatgagtattcagctctcagcagagaaggtagcgcctctctgcaactggtcattcagacatctcctctgctctggctgagtccatggttttttgatcttcagagaggggaagtgcatgctgattggtccatgggtagccatgggcaggcccaggaaaaagggatataagctccccctccaggcagcaggactggcagcccggcgcccaggcttcaggccttcttggcatgaaggtgggacttcactgaggccctgcccccttctgcccaggagctgtctgcctcccctgtcattcatggcacccaggctcttcctgcaaaggggtgcctgcaggccagtgctgagctgccctcagcaccccctcagcttccctcctgtgctcttcagtgcccaaagacaggagggggccaaggcagcagggggctggcatgtcagcactgccctgaacgtgcgcccaccctgctggcctgtgacagtgccctggctcggccccaaccttgctccacaatcagaacatgcaccaggagtggggagaagccaggcagcaggagcaggcacttgcaagcctgttagggtagggggacattccagggcccccaagagttcagggatgcctgagtctgcagccacagtttgggcagctgcagctgtgcccagcagcaggctcctgcctgctcccagtcccccaagagcaaagggaggctcacatctgcagccacggttgggtggctgaagccctgctgggagggcaaggctcctgcctgctctgtggagtgggaggccagggtctacagccatggtttgggtggctgcagtggcaccgggggagctcccaccccaactcagaaggggcggggctcctgcttgtccctagctcccaccagctccatggagggtgcagccttggctgcacctccctgctgcagccagtgtgatggcagtggcagaccgtctgatgtggccactgccatcagtagcatggaagttaagagagcaggctctggacccagactgtccggattgaaatcacagtccaagttcagtgtgtcagacaggttatttaatccctgggttatttaagccttagcctcctcatgtgtaaaatggtataaccataggttgtacctcatgaggttgatgtcgggatgtaatgaatcaatttatataaaaagcttagcaggcaacacacggtaaatacccaataagcaccagttagctaattttactatcacaaagggataaaggacaaaagagaaataggtggagcatgtttcctgcttataaggaaaacgaccacacctaccactgtataggcagtggcgcagtggatatcagtctctaacccatcagatgagtttctcggtctcatttggggaacaataagagacagagagaatatggatgtgctatcatctgcccctcccctaacccctccagcaagaaagggataggaatgagtacctcatgttctgtagaaacttgaggtgttgagaataagggctccctccctaccagatattagtgcagtagaaggaagccataagtattgcgcagaagaacttcccagaaaacttagctgcaatcttgaaggaggcaccttttatgataggtggcacatgaggaaactggaagtgaggactacagtggttcttggctgtggctgcatgcgaaaaccacctgagtactttaaaaaaaaagtgcttcttgggtttcacctcgggccaattaagatagaatctttagaaggggagcccaagcaaacggattttttttttaaagtttcccaagtgatttaatgtacattccaaattgagaatagatgacgtgtttcccaaggaaattgtccctctccaagcatttaccattcagacttactacagaagatatgtcttcagtccaggttctaattatattttctttgtaaagcataaagaatttcaaagaaaaaaaatgtgtgagaaaacattgatactggacatagtcataacacttggtacttcctcaataacacacttgatagtaatttcctgcgtaatcgtctctctcactggcgtgtgagggcagggcagcagctgtacctagtgagttcatttgttttcatttgcagtgcttagccagtccagtctctggcacctatcaatcccttagtaggtatttattgaatgaaattctacatacttaatgtttgtaaaagtaaacatgtgtgtggttttagagatcatttattatgtcttggcatattacggtatgaaatgagtttcaaggacataattctaatttataacattcattccttataaacgtttaactttttgtgattcaacttgtgaatgttattatcaaggaaccaagtaagtcataaaggaagggagaggccttctgtatgacatcctaaaaggaatttatcccatttatccttgtacaaaagacattcgacagcttaagaaacctccaacagaagtttcagagaagaagcaaaaatgttcttttcactgtttcttttatttttaataaaaattaaagatattttattaaaacatatctataaaatcagctttcaattatgtcagaatgaagaggtcagcaatactcctccactaaaaaaaaaaaccatacaactggacaaaattgacaaaagcatccagggaactagaaatctactagagatgggcagcaagttgaaaagctcctagagattcaaggagaaacagcagaaggctaattctttcccccacctcccatcaagctcaatcagcaagaatcgtagttttccagtttggagttggccaaaaacccagtggctcttctgccagaggagaaatacttataaagttttaaatttcaatatttagggtcgagaagtggcatgaaattttgtgactttgcatatactaaaagtagcaaactcagaaatgaatagggaaaggccacagctttgttagcccaaggatgcagtcccagttggggtgagcagcaaaccaaccagagtgctaatggggagatcctggaagggttgagacaagttttccacatacccctggctgactgagaatacgaaaaaactaacccagaaaaaggaaaaaaaaggagaaacataagactaaaatcaagttgggacaaatagaaaataaatcacaaaatgatacacctcaactcaactttaacatgcattaaatattagtgtattaaacactccaaataaaaggcacaggtgtcaaaatggttttttgttttgttttttttttcttaaaattgttttgaagaaaagcaaaaccaagcatatgatttacaagagacacttttaaatataaaaacagtgataatgaaagtaaataggtggaaaatgatacaacaggaaaatatttagcataagaaaactagactggttctattactacagctggcaaaaaaaaaatttcaaagcaggcagtattaccaaagataaagtaggatatctcataaaaataataaatgaaaaccaaatagtcttatccatttatgcccctaataactgagcttcaaaattcacaaagcaaaactaacaaaaaaagaagtaaacaaatctccaaagttgaagacttaacaccttcttttcaatagcatagaacaattagacaagaaatcagtaaagtttagaagattttaacaaaactacatacctttgcttaacactaatcagaacactatacccaaccacagcagaatacatattcttttcaagtgtacatggaacatttatcaagataagccatattttgagccacaaaacatctttatatgtttcaaacaatggaaatcttataaaatatgttatctgaccacagaaacaactaacttagaaatcaggaacagatacatatttttagaaaatccccaaacatttggaagttaaacagtgtatctctaaataacctttggatcaaagaagaaataacatgtgaacgattgagaaaatacaacttcaaaatttgtaggatgtagcaaaagcagtgcttacagagaaatggtagctatatgcactcatgttagaaaagaggcttaaaaccagttatctaagttcccacttaaggaagatgcagaagaaaggcaaagtaaaaccaaagtaagtagtaggagagatgttttaagatacacaagagcagaaattaatgaaacagaaagcttaaaatgatagagaaaattgacaagaacaaaattttattctttgaagagactggtcaaaaaggagaaatcacaaattatcaacatcacgaacaagaggggtatcactatagtggaagagggaatgtcactatagatcttacaggcattaaaaggataataaaggaatttttgaaaactttatgacaataaatatgatagcttagatgaaatggaaaaagtccttgaagcagaatttaccaaaaaatatacaatgataaatagaaaatctatataaccttgtatctattaagtaaattgaatttgttatcaaaaacattcccataaagaaacatccaggcccagatggtttcagtggtgaattccatcaaacatttaaggaagagataatgccaatcttatacaaactctttcagaaaatatagaggaagcagtttgcatcacattttaagagaccagtataatcatatcatctgacagagataagaaaataaagttacaggtctatatcatgattacaattgcagcattggtggtatagtggtgagcatagctgctttcaatgattatgaatgcaaaagtcgttaatgaaatatgaccaaaacaaatcagaattccaaaaaagagagagacagagtattattctggacaaagcacatttattccaaagatgcagggttagtacagcattagaaatatcaatgtaattcaacatgttaatagaaaaaagataaaaagcatatgatcttaactgaaaaattaacacaattctacactcattcacgtttagaaattctcaaaaaactaggataaaaaggaacttcctcaacttgacaaaagcatctataaaggtgacagctagcatcatagctaatggtgaaatattgaatgtcccccacaaggatatctacccccaccacaatgctatttaatactgtattaatcgttccaactaatgcaataaggaaagaaaaaaagcataaagatcagaaaagaagaaaacagtctttctttgcagaaaacataattatttacattgaacatcctcagtaatactaaggaataactactagaactatttaataaagtcacagttatatctcatcaatataaatatatatacatacaaatatattttctatatactagcagcaaacaattagaacagcggtgtttttttttaaattgacttagtatccaaaaaacgtaaaacacttaagaataaacttaacaaaagacatggaaggcctctgcactaaaaactacaaaacactgctgagaaaaataaatgatctaaattgagagttatgccatgttcacatgttggaacactcaatgttgttttgtagtcagttctcctcaaatcgatctggcaattcaatgcaatcacaatcaatatactaacaggcattttaataacttttcaaagttgattctaaaatttatacggtaaagcaaagaatacaggaatagccaaaatggctgggcacagtggctcacacctgtaatcctagcactttgtaggggtggtgtgggggctgaggcaggaggatcacttgaggccaggagtttgataccaatctgggcgacaaagtgacaccccatctctacaaaaacattttttttgaaattatctgggcctcgtaatgcacacctagctactcaggaggctgaggcaggaggatcacttgagcccaggagtttgaggctgcagtgagtcatgatcacaccactgcactccagactgagtaacagagtgaaaaaatgtcagaaagaaggaaagaaagagagagggagagagagaaagaaagaaagaagggaaagaaaaggaaagaaggaaagaaagaaaagaaagaaggaaggaaggaagggccaaaataatcttgataaagggcaaagttgaaaggctcatgctacctacttcaagacttgctataaagcctcagtgatcaagacagtgtgatattggcataaggatagataaatagacatatattgcagaatagggaatccagacatcatctcatacatgtatggttaacatacgttttttttactaaagttgcagagctaaataatggggaaaagagagcctttacaacaaatagtgctggaataacagaataaatgaaagaaggaaaaatagatcttgacatctacaacacaccaaacacaaaaattaatttgagatgggtttcagaattaagttaaaaacttaacaaatatctagaaaaaaaaaaaacagaatgtctttatgacttatctacaggactccaaagacactggtcatttaaaaatgacttacagatgcctgcagctcattctggggaaaggtcattcattgttatgaccaatgtggatacaaagcctaacacaaaaaggtcttgaacttttggattaggttgttcttgtattgatcactgttctcaaaaggaaagcctcaacacaagctgtctacctatatcatccccttgtacaaagaagggaactgaaacataaagaagaaacaagtcgtccactagcattggtgacatcagcaaaattgtagaataggcagctccaaactcccgtccctctacagaaatactgaaaaacaagaagcaactgtcagagccaactttgctagaactctggaaaagagtcagaagtttacagcaattaagaaagtgctgaaccaagaaaaagcaacttaaaaatgataggacatttgccagttttttaaattggggggaaaatgataggaaaactttgtggcatttttacttgtccttgccacatcccctctttgtctcagcagcagtcttaaagacagcatcccgtgttcccagtatgggaccctgaaccctggttctggagggagcagagcaggcttcaattgcaaattactggagtttgtttgtctgttctaacctattcgggagctaactgaagaacttatatgaggtatgcatctcgttttgcctaactgagaacccgtgaagagggagaagtgacaatcattgctcagaaacattgtaaggtgaatacaaaacctgcagccacctgggggcaaaagattaaggttcagacatacaatagaatgtctgaggtctgggagcaaaagccaggaagagagttcctttgggaaattagggcaattcaaaactgccagtgtgtattcgggagtttagaaagcaacatgcatgccaggacaggacgcatgttcagaaaagacctgagaagaccctaaccactggctgatctctgggctcagtacaagtagaaagtaaaggctcatgggaatatatatatatatatgtgtatatatatatgtgtgtgtgtatatatatatatatatatattttttttttttttttttttgagacagagtctcgctctgtcacccaggctagagtacagtgatgtgatctcagctcactacaacctctgcctcttgggttcaaatgattctcctgcctcagcttcctgagtagctgggattacaggtgcctgccaccacacctggctaatttttgtatttttagtagagacaggattttgccatgctggccaggctggtctcaaactcctgacctcaggtgatccgcctcccttggcctcccaaaatgctgggattacaggtgtgagccaccatgcccggcctcatggggaattttaaatggcctaccaaagtgttaatagtgccccaagacagagccaatccacaaagactagaagaggagggggttttacttgttttgttttacttagctcctggcaatcaaggacagctctatcaaaaacactggctgaacacaagctaagccttcagcaatcaagacaagcaaaccgtaaggaactggaagaatctgacttccagagttaaaacactgtaatatttgaatgttcaatttttaaaaatcacaaggcatacaaagaaacaggaaaggataatgcattcaaaggaaaaaaaataaactgacaaaactgtccatgagaaagctcaaacattgaaattattaggcaaagactttaaaaacaactgtcttaaatgtattcaaaaaactaaaagaaatcatggaaacgaagaaaggaaaccaggaaaataatatatgaacaaaacgagaatatcaatacagagatagaaattataatgaggaatcaaatagaaattatgaaggtgagaagtatgataactgaaatgagaaatttcactagaggagttcaacagcaggtttgatcaggcagaagaatgatttaacaaacttgaagataggacaattgaaattatccattctgagaagcagaatgaaagagtgaagaaaagtgaacaaagactaagatacctgtggaacaccatcaagtggaccaacatatgcattatgagagtctcagaaggacaagggagagagagagacagaaattatatgtgaatggccaaaagtgtcccaaatgtgataaaagacatgagtctacatatccaggaagctcaacaaagcccaagcaaaataaacacgaagagatacaccaagatacagtataggcagattgtcagaagacaaagagaatcttgagaacagtgagagagaggcaactcatcctgtacaagggagccttaataagattaacagttgatttcgcatcagaaaccatggaggcctgaaaacaggaggcctgatgccacttcacacctactaggatggatataattttttttaatggaaaataacaaggagaggatgttggagaggacatgaagaaattgggacccttgtacattggtggtgggagtgtaaaacgatgccactgctgtggtaaagcttggtagttcctcaaaaagttaaatgtggaactaccacatgacccaatgtcttagtccatgcaggatactacaacaaaaataccataaactggatagtttataaacaacaaaaatttatttatcatagttatagagaccgagaagtccaaggtcaaggtgccagcagattcagtgactggtgaagggatctatgatcccttcct

SEQ ID NO: 389 - DNA, 45223 bp, Homo sapiens
gggtgggcggatcacaaggtcaggagttcaagaccagcctggtcaacatggtgaaacaccatctctactaaaaataccagaaattagctgggcatggtggcacgtgcctgtaatcctagctactggggaggctgagtcaggagaatcacttgaacccgggaggcggaggttgcagtgagccaagatcacgccactacactccagcctgggcaacagagcaagactccatctcgaggaaaaaaaaaaatgatattgccccattgcactccagactgacaacagagcaagaccctgtctcagaaaacgaagaggaggaggaaaaaaaaagtactaattatctgaaattccaatttaaccaggcatccagtgttttatctggtaaccctcattcttacacacacacacacacacacacacacacaaaggcgggatagttgtcattcccactgtaaacataaggaaactgggcagaggccaagcaaccttgtgtagctcacatagcaagaagtgggtgaacccagctcatgtcttgactctgagctcagagagtgacaacttgtcaccagcgcccccatagccaccaccctttgtccaccccaggctccctctgcaccccaacgcaagctccggccgcttctctgtccccctcctcctgccgcatcacagcccacctcagcctctttgtaggtttccatgcgacgctgtaccatggctgggagtcttccaggcgccgtgctgagcgccttctgtgcatggactccaagtcgccataatcgtacgggttacccaccattatcagtcccctcttatacatcaggctagtgagacagtatcttatccacagtcctacagctggcaggagtagattcaaaccctagcagcaccaattagtggtaaagagtgtggacttgggaacttacaggagtagagagcacagtggtggttaccggggcggtggggtaaggtttggggagatgttggtcagaggaggacagtttcagttggacaagaggagtatgtcttggagatctactgcacatcatggtgactgtagttaataacaacatattgtacacttgcatatcaccgatagtagattttaaatgttctcaccggccgggcgcgctggctcacacctgtaatcccattttgggaggccaaggtgggcggatcacctgaagtcaggagttcgagagcagcctgaccaacatggtgaaaccctgtctctactaaaaatacaaaaattagcggggcgtagtggcaggagcctgtaatcccagctacttgggaggctgaggcaggagaatcgcttgaacctgggaggtggaggttgcagtgagccaacgtcatgccactgcgctccagtctgggcaacagagtgagactccatgtcaaaaaataaaaataaataaaaataaatgagcgtggaatactactcagccattaaaaggagtgaaataatgtcttttggccaggcacagtggctcacatctgtaatgccagcactctgggaggccgaggtgggtggatcacgaggtcaagagatcaagaccatcctgcccaacatggtgaaaccccatctctactaaaaatacaaaaattagccgggcatggtggcgggtgcctgtagtcccagctactcgggaggctgaggcaggagaatcacttaaacccgggaggtggagtttgcagtaagccgagatcacaccactgcactccagccttggtgagagagcgagattccgtctttaaaaaaaaaaaaaaaaagtcttttgcagcaacttggatggagctggaaggcattattctaagtaaagtaatacaggagtggaaaacaaaaatctgtatattctcacttataagtgagagctaagctgtgggtatgcaaaggcatgcagagtgatgtaatggacttcagagactcagaagggaagggcagaagtggggcagggatgaaaaactacacattaggtacaaggtacactagtcaggtgacaggtgcactaaaatctcagaattcaccagaatataattcatccatgtaaccaagaaccacttgtatcccaaaagctactgaagcaacaagccagatgcagtaacctgtacaggccacacctgtaaccccaacactttgggaggccgaggtgggtggatcgcttgagcccaggagttcaagaccagcctgggcaacatagcggacccccgtaactaaaaaaattacaaaaacaagccaggcatgatggtgtacaactgtagttccagatactcaggaggctgatggggaggcactggttgagcctgggaggttgaggctgcagtgagccatgatcatgccactgccctcctgcctgggtgacagaagtgaggccctatctcaaataaaattaaataaataaaagttaaaacaggctgggtgcggtggctcacgcctgtaatcccagcactttgggaggccgaggcgggtggaacctgaagtaaggagcttgagaccagcctggccaacatggtgaaaccccgcccctactaaaaatacaataattagccagacctggtggcagatgcctgtaatcccaactattcgggaggctgaggcaggagaatcacttggacccgggaggcagagtttgcagtgagctgagatcatgccattgcattccagcctgagcgaccgactgagcgagactccatctcaaaaaacaaacaaaaagaaaaaaagaatacatccatggatggataatgaatgagaggttgtttatattcacagttaaccctctcatctccagtaatgcaaccatcttcttcctgcttagccttttggagatgctgtccctttagtggtcaaattctgaagaaatcaggaaataatgcattcgacatgcccagcacaagtgaagatcaggcagcagaaatgcattcgacctgccacccatccatcaggagactatttactccactactgtaggggatactgacaaattaaatccatacctagtccagatatcaattccacaatttttttttttttttttttgagacggagtttcgctcttgttgcccaggccagagtgcaatggtgtgatcttggctcaccgcaacctccacctcccaggttcaagcgattctcctgccttagcctccagagtagctgggattacaggcatgtgccaccacacccggctaattttgtatttttagtagagatggggtttctccatgttggtcaggctggtctcaaactcccgacctcagatggcccacccgcctcggcctcccaaagtgtgtaagccatggcactcagcctttttttttttttttttttttttttttgagatggaggctctctctgttgcccaggctggagtgcaatgcctgacctcagctcactgcaacttctgcctcccagtttcaagcaattctcccacctcagcctcccacgtagctgggattacaagcacccgccatcacgcccggctaatttttgtagagatggggtttcaccatgttgaccaggctggtcttgaactcctgacctcaggtgatccacccacctcggcctcccaaggttgagattacaggcgtgagccactgtgcctggcccacattttttaaaaaaggggcaactgcagtgtagtagaacaaagttgtgaccaatgctaggatactctgttcatttcctgacccagccatgaatacactggaataactcatgcaaaatgccagctcgctggccccccgtttccccacccaacaaatgaaggggctcttacaggttcctttttgtcctgaaattcatcaccaatgcaaatttcttaaaaatcctttgtctggcagtccatgcctgtccttcagcatttcccagatctgaccctcaggactcaccaagacagaagagggcggtcggggatggagacatggttcctcagccctgtcctgagctctgtggccagggagggaagtggtgggagcctggggcacaggctcaggatgtgatgaggatgaagaatgctctcctcccttcctccaccagccccggcctttcctaattgagactcatcgagccgtagccggctcctcagtacagtgacttgcacacaagctccaaggagccgcgcttatctcctctggccagcctggcgttgcaccgtttgtccgcctgctggggcctggtctgtgttcccgtgctcccataaactccctgatgtcactaggaaaatacgcatcaaaaccacagtgagatatgacttcacaccttctggaatggctgtattttttttttttcttttgagacaaagtctcgttctttttgcccaggttggagtgcagtggcgccatctcggcccactacaacctccacctcccaggttcaagcgattctcctgcctcagcctcccaagtggctgggattataggtatgtaccacaccaggctaatttttgtatttttagtagagatggggtttcactgtgttggccaggctggtcttgaactcctgacctcagttgatccacctgcctcggtctcccaaagtgctgggattacaggcatgagccactgcacccgaccggctataattttttttaatggaaaacagcagatattggtgagtatgcagagaaattgaactgcgcgtgcattgctggcagggacgtaacatggcgcccctgctgtggaaaacagttccagcagctcctccagaagttaaacgtgggattgccataaaatccagcaattccacttcggggtacacacctaaaagaactgaaaacagggtctctaacatatttgtacacagtgttcatagcagctttattcacaatagccaaaaggtgaaaccacccacatgtccatcaacaacaatggataaacaacatgtggtatatacacacaaggtaatatcaaccagccttaactaaaagaataaaaatcagccaggcacagtggctcacgcctgtaatcccagcactttgggaggccgaggcgggcggatcacctgaggtcaggagtccgagaccagcctggttaacatggtgaaaccccatctctactaaaaatacaaaaattagctgggcgttaaattagccgggcatggtggcaggtgcctgtaatcccagctacttgggagacggaggcatgagaatcgcttgaacctgggaggcagagattgcggtaagccgagatcgcaccactgcactccagcctgggcggcagagtgagactgtctcaaaaataaaaataaggccgggcgtggtggcccatgcctgtaatcctagtactttaggaggctgaggcaggcagattgcctgagctcagcagttcaagaccagcctgggcaacacagtaaaacccccaaaaaatacaaaaaaaaaatagccgggcatggcggcaggcacctgtagtcccagctactccggaggctgagacaggagaatggcttgaacccgggacgcggaagttgcggtgagccgagatcgcgccattgcactccagcctgggtgacagagcgagattctgtctccaaaaaataaaaaatattataaaagaataaattcagatacatgctacaacgtgatggaccttgaagacattatgctaaaggaaatattccggacttgacagataaatactgcattgtgccgcttatctgaggtatcgagaggagtcaaattcatagagacagggattagaatggtggttgccaaggcctgggaaaagtggggagttactatttaatagggagcgcttaggttgaagatgatgacaaagtctgggggatccatagtggtgatggttacacaacactgtaaatgtatttatatttaatgccattgactgttttttgttttttggttttttgagacggagtctcactctgtcgccgaggctggagtgcagtggcgcgatcttggctcaccgcaacctccgcctcccaggttcaagcgattctcctgcctcagcctcctgagtagctgggactacaggtgcgtgccaccatgcctagttgattttttgtatttttagtagagacggggtttcaccgtgttagccaggatggtctcgatctcctgaccttgtgatttggcctcccaaagtgctgggaatacaggcatgagccaccgcgcccggccagtgccgttgacttgtatgtgcacttacaggtggttaaaatgagaactatcagggtgttgatatctaaaaacctccctgccatcatcttccctacatctctcattcagtgaccatggttgaatgcctgccacctttcaaatattatgtcaggcactcagtattggcagttttatccattataaatgctttaagctgcatagaattttaaacgtgttaataaaagtagttataaatctttaatacataagctggctttaaaattattggtaaaataagattagaaatgtcttaagaattgttggcgtttttgtttgcacttattgaacgagtggtttcatgcttatccctgcagaatactatgagatttgtcataagggttataaaactataaacccggctgggcgtggtggctcacgcctgtaatcccaacactctgggaggccgaggcaggcagatcacctgaggtcgggagtttgagaccagcctgaccaacatggagaaacgccatctctactaaaaatacaaaattagctgggtgtggtggcgcatgcctgtaatcccagatactcaggaggctgaggcaggagaatcgcttgaacccgggaggcagaagttgcagtgagccgagattgcgccactgcactccagcctgggcaacaagagtgaaactccatctaaaataaataaaaataaaacatttgttttttgtagagttggggtttcactatgttgcccaggctggtcttgaactcctcctgggctcaagcaatccaccgacctcagcctcccaaagtgctgggattacaagtgtgagccactgtgcctggccctattgggtccttttaaaagatacataaaaaatcaaatgcaacagtgaagtcaatcacccgatggcagaaattggggtgctcctggcatgtggtcggtcgaagccaaggacactgctcagcattctgcagtgcacaggacggccccgcccaggcggagaatgatccggtgacacatataggtgggaaggatgcacgaatgatggcgtttaggaagaatattatcacttctttcccgtaagagcaacttagagcaagaaaatggtattattcttagggccttctctcttatggaggctccaagccagggttgccatggcagaagatgctgggcttgctttttccttgagagaactgtactcaagatgatgtaactgtcaccccgggtgccacttgggtgctttggagaagcgctcagacgcgacacgccgtgacgactccgcggcaggcagccggacctgtcctctggcgtgcggttcacgggctgtgtttatccccctggttccttcacagccaccttgggaaatacgttgcctctgaatcacgccaggcaggctctcactgtgtgtgctgcggggctggaaatcagggtgacactccgctaccgaacagcctgactaggaagccagaaagacgctgccggctttagtttgtcctttgactttccttgatatgaatgaagatagagcacttccacactgcacaacaggaaaagcccagaacgcttcctggagatagcgagggggtgatgcagcggacagctatggctgatgaccccctcacctctgactccccctccctccctgctttctgaacgcacatccatcaccaaccataggttcctgtttggggtttgctggctggaaaaaaaaaaaaaaaaaaaaggaaagctggctttctagtaaaaaccacttcctttgctcatttatcaaactcaaacgctaggagggccacctaacatcctccgtcccacgcaatggggtgtttctggagcactccggtttatcagggaccctgtcagttgccatcgcacatgtatatggggccagcccctgtgccaccgaagaggggggatattgaaaacatgttacagccaggagcggtgcccccttggttcaagcagttcttctgcctcagcctccctaatagctgggattacaggcgtgcaccatcacgcctggccactgttatgtagtttttaccacaatttaaaaaaggaaagagtgcctgggtgagtcctacgcacctattcggagaaccaaaggctttgaggttatcctcggcccacccatctgatgggagtgtttctcaaacttgcttttccgtgatctcccagtaagaaatacctactacacacacacagtctccggtcggcatgcttagggtagtcttccaattccccctcctggtatttacaccctggagtggtccgctcctcttgggctgaacctgtaacttgctcccaagcaagagcacacagcaagctcacgcacgtggttgttggtgtgattctgtttctccagattgtctccattcctccctggcttctccacagggccgctcaccatggcagccggctccatcaccaccagccagcgagagggcaagacaagagggctgacgagggacgctaccatcacagaggtcagttttgtaacctaaccacaagactaacctactgtcacttctgccctatcctactgctagaagccagtcgctacatctcccccacactcaaagggaggtggtcgcaccgtggggtccactggaagttgcctaccagactcaggtcatcccaaacacaccctctagccatttggtgtggcatcggaaagaaaactaaggccaggtacggtggctcatgcctgtaatcccaacaatttgggaggccatggcggaagggtcacttgagcccaggagtttgagaccagcctgggcaacatagcaaatgttatgttgccacctctacaaataattagccaagtgtggtggcatgcacctgtagtcccagatactcaggaggctgaggcaggagaatcacaggtcgaggttgtagtgagctgtgacggcactgcactccagccttggcaacacagtaagacctcgtctctaaaaaagcaaaaagggctgggtgcactggctcacacctataatcccagcactttgggaggccaagacgggtggatcacctgaggtcaggagttcaagataagcctggccaacatggtgataccgtctttaattagccaggtgtggtggtgggcgcctgtaatcccagctactcgggaggctgaggcatgagaatcgcttgaacatgggagacacaggttgcagtgagctgagatcatgccattgcactccagcctgggcaacagagcgagactaggtggctgttctgtgtactgtgggatattgagtagcatccctggcctccccagtatctcaaatatgaaaacatgttttctatctcgattactgagcttttcggtgcctccttcggttctgcacctaagctaagagccccttcatctcaccctgatctctatccagtttctaacacagcagtcttgtaagatgcccggacttaaacggttatttcctgtgaaacaggtgaaaggggctttcatctctaaaaagtcggaacttttttttttttttgagacggaatcttgctctgtcacccaggctggagggcagtggcatgatctcggctcactgcaatctccgcctcccagcttcacaccattctcctgcctcagcctcccgagtagctgggactacaggcgcccaccaccatgcccagctaattttttgtatttttttagtagaaacagggtttcattgtgttagccaggatggtctcgatctcctgacctcgtgatccaccgcgcccggccaagtctgaacttttgcatggcctgttgccctggtgataaactgatgccttgtttcctaaaaggaataaagccatgagttgcctttgttcagctcatgggcattcacccatgcacagaggaaaaataaaatctacgactcgggtacattttcttcttttttttttcttttaaatgagcaagtttgagagtctgcagtttggactaccatgagaattgataggaaggtgggagtcccaggcaatcccaggtcctgtagcagcagctggtggggttcccactccatgccgtgcagagcctgaactcaggatgacacctgcacctgctctctggctgggctctggcacaggaagccctcagcaaacacccccggcacagccatgccatagccagacaacagctcgctgtaccacaccatcatgggagacagcagttattctgagcatctcactgctgaagaaaccaaggctcagagaggaccatgcatgcacaaggtcccacagggacccaagaatccaccaagtgtcagacaacttgcccatgctcttcacggagcaccttggaaccctccccgacaggcaccgctggctctcctgacgtggcctgcaagtgcacggagccccttcctcctcggccattcccagtttagattcccaggggaagcatcagatggcccctctcccctgctggcagcagagcagacggaaccagccagagcccagggcagtgctcacctgcaggccagtccactgcggccagcaccgccccctagaacctactgcgggcatggcggccgccagtcctgggtctcccggctcaggtagtgccaggaagctgcgggcatggcggacagctgtcctcggtctggaggcgccatcctggctttcaaatctgctccagaggttatctggggaggggctgctccctcacagagggagcctctaagcccaccaggcgggcactttcagcccaaagcctccgggccacctcctcatcctcagcctcgggggccggggccttctgtttgagtccatcgaagtactttccggaaacatccgccagttcctccgccacggccaggtatgtgctgggctgggcggccagctcggggctcttgaccagcagccagaagatgggccctgcaatcagcccacagggcatttagtccacactcgctcagagagaaggaaggaagccccgctccccggtcagggagctccgggtccctggagtcccacagagccctcctctagccctttccccttggctgcctccatctgcagttcccttccctggcactgcccaggcaaatcccaccagaccagggatcagaccaaaagctgcctcccccaaggagccttcctggctttgtccaggaaaatggaagctctcttcctcttggtcagccccagtcctcaccctaccccatttctcctttaataacatcttattaaatgcacctggcaccagcctcaggttaaggatctttttttggccaggcgaggtggctcaggcctgtaatcccagcactttgggaggccgaggcgggcggattacctggggtcgggagttccagaccagcctggccaacatggtgaaaccccatttctactaaaaatacaaaaattaactgggtgtggtggcgggtgcctgtaatcccagctgctcgggaggctggggcaggagaatcccttgaacctgggaggcggaggttgcagtgagctaagatcacaccattgcactccagcctgggtgacaatagcaagacttcgtctcaaaaaaaaaaaaaaaaaagggctgggcgtggtgactcacgcctgtaatcccagcactttgggaggctgaggcaggtggatcacctgaggtcaggagttcaagaccagcctggccaacgtgtgaaaccctgtctcaactaaaaataaaaacttagctgggtgtggtggtgggcgcctgcaatctcagctactttgggaggctgagacaggagaatcacttgaaccgaggaggcagaggttggagtgagccaagattgtgccactgcactccagcctgggtgacgagcaaaactccgtctcaaaaaaaaaaagacatttatttatttatttattgagacctggtgtcttgctctgtcacccaggctggagtgcagtggtgtgatctcagctcactgcaacctctgcctcccgggttcaagcgattctcctgcctcagcctcctgagtagctgggactacaggtgcacaccaccacacctggctaatttttgtatttttagtagagacggggtttcaccatggtggccaggctggtctcgaactcctgacctgaggtaatccgcccaccacagcctcccaaagtgctgggattacaggcgtggctattagcctcgccaagttaagattcttgatgccaaccaatcacccactccatgtttttcaggattataaacactagtcataaagcatgaactgcctgggggtggtggctcacacctgtaatcccagcactttgggaggcagttggatcacctgaggtcaggagtttgagactagcctgaccaatatggtgaaaccccacctctagctgggtgtggtggtgtgcacctgtaatcccagctacttggagacaggagaatcgcttgaacctgggaggtggaagttgcagtgagtggagatcatgccattgtactccagcctgggcgacagagcaagacttcatctcaaaaataagtaagtaaagctccaactgtttgttccacctattctctgggcggggtcctgtgctggccctttcaaggaaggtctcgtataacccccccagtgactgtgaggtgagtcctattaaggcctgcactctgcagatgaagaaacaggctcagaggggtaacagctcttccccaggaggtgcagctggtttggggtgaagctggagttaccctgagtacagcctgactccaggcgtcagctccacggcctcttcctctgagacacggttttctcatccgccagcagggctctgcctgcttcccggggctgttagaggctggcaggccaggtcaacggaggaaagggacctgtgctctgtgcctcagaagacgtaggcgaggagcaggcatgaggcctcagggacggtctctgagggagggtcctgggccctgggctgagaaagcaggggtggagggctccacgtggagaccccaggctgggaggggactcaccgagtgtggtgctggagaaggtggagccatggatgcccgtgtgtctgcccagctctgtcctggccacgccggggtgcagggcgttgacagtcacaccagagcctggggaagaaagaaagagaagactgagggaggggtccagcctcacctgggaggctgtggcagcccacacccagctgtggggcttccgggcaccaggctgcttcctgcactcaaaccccatcgtccctcttgctctggaatcttagtgaagtggtcttatcttgcggagcggctctgccacatggctgctgggagccgagctttcctggagggcttcataaacccagaacgctgagcttaccccgggagcctgcatcggtgcgtggcggtgggacctaagatactgtaactctgaccagctcccagtggggctggcaccgctggtccacagaccgtctttcagaagcaaaggcctagcacagatttctcaatctcagcactgtggatgctgtgggttgggaggagtgaggggccatcccgtgcgctgtaggacattgagagcatctgggcctttaccctccagatgcccagagcaatctctccccaagccagctgtgatcactgtgtttccaggcattgacaactgcgggtcaaaactgcccctggttgagactcactggctggagccaaaaggctgagctgcctgcccaacagcagcagggaaggacatctgatccaggcagactagaccacctgggatgaacagacaatcctcagaagaacgatcgattagtgatgtctgcttcaggcaccagaagcgggcagcgtggtccacatgctctacttttgctgactctgttctggatccaccgtttggcctcccatcagcctaggatcatggaaaggccgctctaggctcagagtaaagcaagagggaggccgagcctagcgcccccgtaccttgcagccgccggctcagctccttggtgaagaggacgatggcgagcttgctctggcagtaggcggctttggtgttatacttcctcgtctgccagttcaagtcgtcaaagtctatgtgcccagcaacatgggccagggacgagaggttgatgatccgcgaaggggctgaggctttcagcttgtccagcagcaagtttgtcaagagaaagtgacctggattaaggatgatgaaaaggtcacttttgactcacacctaaaatcccagcactttgggaggacgacgggggaggatcgcttgaacccatggtgcagcccctgcccaggcctcacccaggtggttaacgccaaactgcatctcgaagccgtcctcggtggtccagtgggggcaccgcatcacacccgcgttgttgattagaatgtccactcgctcctcctctggaagagaggggtggaggaggagacatcccggtgaggacagaccccagcctgatgcaccagcagaaacactcctgtgctcccacaacctgtgaatgtggcctgtgccggaaacagggtctgtgccgaagtggccatgtcaggatgcggtcattagggtgagccctaatccaatgactggtgtccttataggaagggaaaacagagacagagacacatggggagaaggccatgtgtggacagaggcaaagaccggagaggcacagctccaaggtgagggtgggccgcccccgctggaagtggaagaggctgggaggattatggcccgtctcacaggtcacagccacagggacaccgcgattcagactgccggcttccggaaccgtgagggaatgcacgtctgagggtgtaagccactgggtttgcagtacattgttacagcagctccaggacactcacacgccctccgcacctccatctaagccttgggactccttcctgccggagccccgaggccaaaaacgggaggttaccggtgggagccccggcaccgcaggcgtggtttcattcccaaacctgccacctcactcatacaagcaaccaaaggacacacagatggagactgcagcctcagtttcctcagctgtaaaatgcgctgaaccacagggccttcctccctgtaccactcagctcgggttccgtaacaaagtgccacagacaggtggtttaaaacctcacagacctggccgggcacagtggctcacgcctgtaatcccagcactttgggaggccgaggtgggcagatcacctgaggtcaggagtttgagaccagcctggccaacatggagaaaccgcgtctttactaaaaatacaaaattagccaggcgtggtggcatgcacctgtaatcccagctactcaggaggctgaggcgggaaaatcgcttgaaaccaggaggcagagggtgcagtgagccgagatcgcatcattacactccatcctgggcaataaaagcaaaactccatctcaaaaaaaaaaaaaaaaatcacagtcccagaggctggaagtcccagatcaaggtgtgggcagggctggttccctctcagggccctcagggaggatccgctctggtctctctccttggctcacaggtgaccatctcctctctccctcttcccttcctcttccctttggagctgtctcttttttttttttcatttttccttttttaattttagatttttcagacatggtctcactatgttgcccaggctggtctcaaactcttgaactcaagcaatcctcctgctttggcctcccagagtgctgcaatttcactgcccccagcctatttttttttttttgggggggggagatggagtttcactcttgtcacccaggctggagtgcaatggtgcgatcttggctcactgcaacctctgcctcccaggttcaaacaattctcctgcctcagcctcccaagtagctggactacaggcatccaccaccacaccgggttaattttttgtatctttagtagagacggggcttcaccatgttggccaggctagtctcacactcctgacctcgtgatccacctacctcagcctcccaaagtgctgggactgcaggcgtgagccaccacactcagtctacttggcctattttttatatttctttgagacagggtctccctctgacacctgggctggagtacagtggcgcaatcactgctcactgcagcctcaacctcccaggctcaagcagtcttcttgctcagcctcccaagtagctggggccacaggcatgcgccaccatgcccagctagcacgtctgtttctgtgcgcaaatctccccttttcataaggacaccagtcactggattagggcccaccctaatgacctcattttcacttcaggacctctgtaaacacccacctctaaatgaagtcacatgctgagggatgggggttcaggatcccaacctatccttgggggtggaggacacaatggaattcataatgctcccgaagtggttttcggcggggatcgtgaattaggtgtccagcgcgtaacacacagacaccatctggttctctgtgtgagaaggagggggttgcagcacacccgtcatgaataccagctctggagcaggacagacaggttcaaagcctggctccaccccgaccagctgcatgatcctggccaagtcacatcacttctctgtgactcagtttactccttgtaaaaaaaaaaaaaaaaaaaggataataacatcacctgcctggtacaactgtatacttactcattcagtaagtattttctaagcacctattactgggcactggaaatacagggtggacagcacagccgaggccccgtccgtgtggaccggacattccagtgcagctgagagccacttccactcgtgagagaatctacccgtgacagagctgcgtggaagctgacaggaggcccctctcaggaggtgacgcagaaactgggaccgggaaaatgaggcagggcccacgtgcggagacccagggaagggggatgcaggcagcaggcgcagcacgggtaaggcccaaaggcgggacagggagactccactcacagctgggcgcccaggagtgccgccagcttctggtgttttgttttggttttttttctttttttttttgagatgaagtctcactctgccacccaggctggagtgcagtggtgtgatcttggcccatggcccactgcaacctctaccgcctgggttcaggcgattctgctgcctcagcctcccgagtactgggattacaggtgcccgccaccgcaccctgctaatttttgcatttttagtagagacggggtttcaccatcttggtcaggctggtcttgaattcttcacctcgtgatccacccgcctctgcctcccaaagtgcagggattacaggtgtgagccaccgcgcccagcctgtttttttttttttctttttatgagagggaagctcactcagtggcccaggctggagtgcagtggcgcgatctcagctcacagcaacctccgccgccagggctcaaacgatcctcccacctcagccttccacatagctgaaccacaggcgcccgacaccacaagcagctacttttaaaattttttgtagaaatggggtttggctatgttgcttaggctggtctcgaatttctgagcttaggcaattcgcccacctcggcctcccaaagtgctgggattgcaggcgtgggccacagtgcctggcctgttgttttgtttatctgggaactgcctcaactttttttttttttttttttttttggacacagggtctcaccccgagtgcagtggtacaatcaaagctcactgcaggccgggcgtggtggctcacatctgtaatcccagcactttgggaggccgaggcgggcagatcacctgaggtcaaccagcctgaccaacatggtgaaaccctgtctctacctaaaacaaaaaagtagccgggcatggtggcaggtgcctgtaatcccagctactcaggaggctgaggcaggagaattatttgaaaccaggagatggaggttgcagcctgaccaacaggaagaaaccccgtctctactaaaaatacaaaattagccgggcgtggtggcgcatgcctgtaatcccagctactcgggaggctgaggcaggagaatcacttgaacccaggaggtggaggatgccgtgagccaagatcccgtcattgcaccagcctgggcaacaagagcaaaactccgtcttaaaaaaaaaaaaaaaaaatccctcactgcagcctcaacctcccaggctcaagcaatcctcccacctccacctcccaagtagttgggactacaagtgcacaccatcacgcctgcctcattgttttttattttttttttgagatggagtctcactctgtcacccaggctggagtgcagtggcgccatctcggctcactgcaagctccacctcccgggttcacgccattctcctgcctcagcctcccaagtagctgggttacaggtgcccgccaccacgcccggctaatttttttgtgtttcttagtagacacggggtttcaccgtgttggccaggatggtctcgatctcctgaccttgtgatccgcccgcctcagcctcccaaagtgctgggattacaggcgtgagcctgcacgcctgcctgattgttttgtattttttgtagagatgaggtcttgctatgttgcccaggctgatctcaaactccctgataaacaaggctgtgggtacctgcttcctggggctctttgctttgtgttctttctagtcgggagctgggaagagccacagcttccagctttgtcagagtgtcatctcacaaactgatcttcccaaaacttctgtctcccaaagtgccgggatgacaggcgtgaaccgctgcacctggcctgccccagtgtggtagaatacacaccacataaaatggacgatcttcactatttttaaatccactgctgtctttattcctggctgttgatcttaggaaaacaccaagaagctggtacttgatttgctaaaaaagtcacagacacagctttacttaatcctctagagaggctgggcgtggtggctcatgcctgtaatcccagcactttgggaggccgaggtggctggatcatgaggtcaggagatcgagaccatcctggctaacacggtgaaaccccgtctctagtaaaaaatataaaaaattagccgggcgtggtggcaggcgcctgtagtcccccgccactcgggaggctgaggcaggagaatggcatgaacccgggaggcggagcttggagtgagccgagatgtgccactgtcctccagcctgggcgacaaagcaagataccgtctcagaaaaaaaaaaaaacccctctagagaatcccagaaaatagaaggaattattccatttcccggaagaggaacgtgtggctaagagaggaggcatcacctgcccaggtgtgtccagccggggtcctcactgtctcagggacctcagtgctccggacacctgtgtccacaagccagagacaggatcagaggcgccctgggtgggattgcctgggacagtgtgcatgaaggtgacagtgctgtacctggtacacagcaggtgcttaataaatgttcatccacctctgagactctgaggcattgccctctcactgttctttgtgatctcaccgtagtgcctctcacctacccgacaacagtgccggctctttcttgatccccaagggcacagcaggggctcagtatgaatgaatgaatgaaccaacgaatgtgcacctgcacctgcctccctagggctgtgagtggcacaaggacagctctggttcatctcacacctccagcacctggtcaggtctgagatcacgtctgctaaataaatgaggtcccacaactcccccattccttgttcatttcctgagtacccgtttactgagcggggcacattgactctgaagaagaaagctttggccctttcagtgccagactagaaaagaaacaaagcagctgggcatggtggctcatgcctgtaatcccagcactttgggaggctgaggcaggcggatcacaaggtcaggaattcgagaccagcctggccaacatagtgaaaccccgtctctactaaaaatacaaaaattagccgggcatggtggcacccgcctatagtcttgggaggctgaggcaggagaatcgcttgaacccaggaggcggaggctgcagtgagccaagatcgcatcattgcactccagcctgggtgacagagcaagactccatctcaaaaaaaaggtcttgctctgtcatccaggttagagtgcagtggcacaaatacggctcactgcagccttgaactctcgggctcaagtgatcctcttgcctcagcctcctgagtagctgggactgtaggcacatgccaggatgcccggctaatttttttttttttttaatctttggtacacacaaggtctcactatgcttcctaggctggtctctaactcctgagctcaagcaatcctaagagaagagattttaaatgtggtcaccacaaaaacaggtaagtatttgaggtaatgcatatgttaattagcttgatttagccattctacaatgtatacaatgtacatcatgctgtacataatatatacaagtatacatgtcaactaaacaataaataattttagtgtattcttgagtctatttaaagatgaacaagaatagaaaagctagaggatggtcccagttttacataaaaatatataaatacacacacaaacctattataaacaagactagaaagatccataaaagtgattctcctggggctggtgcagatcaaagttgtttagttctgtcttcttttttattgagacagagtctcactctgtcacccaggctggagtgcactggcacaatctcagctcactgcaacctccgcctcctgggttcaagcaattctcctgcctcagcaccctgagtagctgagattacaggtgtgcaccaccacgcctggctaatttttgtatttttagtagagacagggtttcaccatgttggccaggctggtctcgaactcctgacctcaagggatccacctgcctcagcctcccaaagtgctgggattaacaggcgtgagccactgtgcccagccagttctgtcttctttacattgcagtattttataaatgtcccataacaaacacatatttctttaaccatggtggggaaggcacttgatcaataaatgcttaataaggtcaggtgcggtggctcacgcctgtaatcccagcactgtgggaagctgacctgggtggatcacttgagcccaggagttggagaccagcctgagcaacatggtgaaaccccagctctaaaaacaaaacaaaacaataaaacaataattagctgtgtgtggtggcgtatgcctgtactcccagctacttgggaggctgaagtgggaggatcccttgagcccagcaggttgagactgcagtgagccatgactgcaccactgcactctagcctgggtgacagagatggatcctgtctcaaacaaactaattattcaggtagggcacggtggctcacacctgtaatcccagcactttgggaggccaagggaagcagatcacctgaggtcaggagttcgagaccagcctgaccaacatggtgaaaccctgtctctacctaaaacacaaaaaattagccaggcacggtggcgggtgcctgtaatcccagctactcaggaggctgaagcaggagaatcatttgaaatcgggagacggaggttgcagtgaggcaagatcacaccactgcactccagcctgggcaacagagcgagaccccatctgtctcaaaacaaacaaacaaaacaaagtcagccgggcgcagtggcccacgcctgtaatcccagcactctgggaggctgaggcaggagaatcacctgaggtcaggagttccagaccagcctggccaacgtggtgaaaccccgtctctactaaaaatacaaaaattagcagggtatggtagcaggcatcttaatcccagctactcaggaggctgaggtccgcgcttgaacccaggaggcagaggttacagtgagccgagatcgcgccattgcactcagcctggccgacagagtgagactccctctcaaaataacagtagtaataaataaataaagtcgttgcttgcaggctgtacaaaaaaaggcagcaactggacttggcccctaactcatagtttgccaaaactctgctctaaagtttgcttgcttcattcacttctcagagcctggccctgggagccgcctatcccagtcctcatcccacatggccagcgttctcctaccttcaatgatctttgctgcaaactctcggatagacttgagggaagccaagtccaggtgccgggcgttgacatggtgattgagggtctccccgcggatgtcctttgctgccgcctcacacttctccatgtctcggcaggccaggatgatgttgcctcctgaaaacccaggatggaaaaagatttaaattaataatccactcctgggtactgaccccagagacatgaaaacatacgtctacacaaaaacacatccaccaatgttcactgcggcattcttcacaaaagccaaaaggtagaaacaaccaaatgcccatctgtggatgaagggacaacaaaatgtggtccatccatagagatggaatattagacggccgtgaaaaggagtgaagcactggctcatgctacagcaaggatgaccgtcagaaacactgtgctcggggaaagaaaccagacacgaaagaccacacagcgtacaatcccatttacatgaattctatgtatatgatttcacacctatgaaacgcccagaataggcaaatccatagagaaagaaaatagattcttggttttctagggcagggggtggggagagggaattacagcttgatagttacagtgagcaggtttctttctagggtaacagatgttctaagattgattttaaagatggttgcatcattctgtgactatactaaacatcactgaattggtcgggcacggtggctcacacctgtaattccagcactttgggaggccaaggcaagaggattccccatcctctccttttttttttttttttagatggagtctcactctgtcacccaggctggagtgcggtggcgcaatctcggctcactgcaacctccacctcctgggttcaagcaattctcctgcctcagcctcccgagtagctgggattacaggcacctaccacaactagctaattttttatttttttatttttagtagagacagcggtttcaccatgttagccaagctagtcttgaacttctgacctcaggtgatccaccccgcggcctcccaaagtactgggattacaaataagccacaatgcccagcctccaattttttttgttgtggtaaaatacaaatcacttaaaatttatcatcttaacccccttttctttttgtttattattatttttttttttttgagtcagtctcactctgctgccgcggctggagtgctggcgccatcacagctcattcagccttgaactcctaggctcaagtgacctgggactataggtaccacctgtgccagcatgcctggctaactctggtagagatgggggtgttgctatggtgtccaggctggtctggaacccctggcctcaagtgatcctcctgcctcagcctccaaaagtgctggaattatagatgtgagccaccgagacccgccctcttagccatttttaagtgtccagttcattggtattaaaaacatttatggctgggccgggcatggtggctcacacctgtaatcccagcactttgggagaccaaggcaggtggatcacctgaggtcaggagttcaagaccagcctggccaacacattacaaacttagctgggtgtggtgttgcatgcctgtaatcccagctactcgggtggctgaggcaggagaattgcttgaacccgggaggcgaaggttgcagtgagccaagatcatgccactgcactccagcctgggcgacaagagcaaaactccatctcaaaaaaaaaaaaacaataataataattcctaatgttgtgcaaccattacaaccatccatctctcaaattgtttcatcttgccaaactaaacttccgtttccattaaacagtaactccccattctcccctcccctcctgacccctggcaagcaccattccaacttctctatgaatttaactgtaggtagctcctgtaagtggaatcataccgtatttgctcttctgtcgactggcttatttcacttcatggaatgtcctcaaggttcatctgtttcaatgcccttttttttgttttgctttgttttgttttgtttttgagtctcactctgtcacccaggctggagtgccgtggcgccatctctgctcactgcaacccctgcctctcaggttcaagcgattctcctgcttcagcctcccaagcagctgggactacaggtgcccaccacaactcctggctaatttttgtatttttagtagagagggggtttcaccatgttggttaggctggtctcgaactcctgacctcgtgatccgccagctttggcctcccaaagtactgattacaggcgtgcaccaccgcgcccggccagaatgcccttcctttttaaggctgaatcatatgcccctgtctatagaagccacattctgtttccctgttcatctgtggatgggtgcctgggttccttccacctccggactgtgaataatgctgcagtgagcatggatgtacagatatctctctgagagccaaagcaggggagattttacctctcctggccagttccaaggcggtctgcttcccgatgcctgtgttggcacccgtcacgatgaccgtcttcccagggatggtggccttgctggggcaagccccaccggtgacatagtccctgagggtgagaagcggcacggtcagtcctgtgggcccactctcaccccacgtgcccctgactgaatgatctcaggcaaccttgtctgagctcactcacataccccaactgaaacacagacatcatcacatcacaccaagggacctctgtcatgttctccataagtggctccacccagtgtctggcgtgtggaacgccttcagcaagtgacagtcattattttataaatgctcactgcatgagattcccggccaggtgagggggcttgcacctgtaatcccagcactttgggaggccaaagttttgggggtgggggggggcgggggcggatcacttgaggtcaggagttcgagtccagcctggcaaacatggcgagaccccgtctctacttaaaatacaaaaattagccagatgtgtagggaaaagagagattagactgttactgtgtctatatagaaaggaaagacataagagactccattttgaaaaagacctgtactttgaacaattgctttgctgagatgttgttaatttgtagctttgacccagccactttgacccaatctggagctcacaaaaacctgtgttgtatgaaatcaaggtttaagggatctagggctgtgcaggaagtgccttgttaacacaatgtttccaagcagtatacttggtaaaagtcatcgccagtctctagtctcaataaaccaggggcacgatgcactgcagaaagctgcagggacctctgcccttgaacacagagtattgtccaaggtttctccccgtgggatagtctgaaatatggcctcgtgggatgagaaagacctgaccgtcccccagcccaacacccgtaaagggtctgtgctgaggtggattggtaaaagaggaaagcctcttgcagttgagagagaggaaggccactgtctcctgcctgaccctgggaactgaatgtctcggtataaaacctgattgtacatttgttcaattctgagacaggagaaaagccgccctatggcgggaggcgagacatgtttacagcaatgctgccttgttattctttactccgctgagatgtttgggtggagagaaacatcaatctggcctacgtgcacgtccaggcatagtaccttcccttgaacttaattatgtcatagattcttttgctcacatggtttttgctgacctcattatcaccctgctctcctactacattcctttttgctgaaataatgaagataataatcagtaaaaactgagggaactcagaggccggtgccggtgcaggtccttggtatgctgagcgccggtcccctgggcccactgttgtttctctatactttgtgtcttatttcttttctcagtctctcgtcccacccaactagaaatacccacaggtgtggaggggcaggccaccccttcacaggcgtggtggtgcacacctgtaatctcagctactcagggggctgaggcacgagaattgcttgaacctggaaggcggaggttgcagtgagtcgaaatggtgccagcctgggcaacagagcgagactctgtctcaaaaaaatttaaatttaaatttaaaatgcccgctgcacgagattcccaaggctgctgtacgcattaccacagacttagtggcttaaaaccacataagtgcatcctcctccagttcggcaggtcaagagtccaaaacatgtctcactggaataaatcaaggtattggtagagtcaggttccttctggaggctctagggaagaatccacttccagctcctacagaccgccacattcctccactcttggccccgcctccatcttcaacctgcatcctcactggaacctctcctttatttatttatttatttacttatttatttttgagacagagtctcgctctgtcgcccaggctggagtgcagtggctcaatctcagctcactgtaaccttcgcctcacaggttcaagcgattctcctgccttagcctcctgagtggctgggattacaggcacatgccaccacacctggctaatttcttttgtatttttagtagagacagagttttaccacgttggtcaggctggtctcgaactcctgaccttgtgatccgcctgccttggcctcccaaagtgctgcgattacaggcgtgagccaccacacccaacaacctctccttctatcttccatctcccctctgactgagcctcctgctccctcttataaggaccctataagactacaaggcaggaccggcacagtgcctcacacctgtaatcccagcactttgggaggccaagacaggaggatcacttgaggtcaggagttcgagaccagccatggccaacatgctgacaccccatctctactaaaaatacaaaaattagcagggcttggtggtgcacgcctgtagagtcagctactcgggaggctgaagtgggaggaccacctgagcccagggagggtgaggctgcagtgagctgtgacagcatgactgcactccagcctgggtgacagagagaccctgtctccaaaaaaaaaaaaagactacatgataatcataagatccttcacttggccgggcacggtggctcacgcctgtaaccccagcactttgggaggccaaggtggccagatcccctttggtcgggagctcaagaccagcctgaccaacatggagaaacctcgtctctactaaaaatacaaaattagacaggcgtggtggcacatgcctgtaatcccagctactcaggaggctgaggccggacaatcgcttgaacccgggaggtggaggttgtggtgagccgaggtcgtgccattgcactccagcctgggcaacaacagcgaaactctgtctcaaaaaaaaaaaagatgcttcacttaacacatcagcgagaacctctgacacgtgaggtaatgtcgtcacaccttccgaggattaggacgtggacccctctacggagtcacgactctgcccaccacacccatgtcccacagaggctaacgctggcaacaagatagtgtccagcaacaggaggctgagcaggtaaacagcactgcacccacaggagagaagggcaccatgcaatacagtggccaccagccacagaggctaatttttaagaaagtttaaattaagtaggctgggcgaggtggctcacgtctgtaatcccagcactttggaggccgaggcaggcggatcacctgagggcaggtgtttgagaccagcctggccaacatggcaaaaccccgtctctgcgaaaaatacaaaaattagccgggcgtggtggcgcacgtgtgatctcagctcctggggacgccaaggtgggaggatcacctgagcccaggaggtcaaggctgcagtgagccaagatcgcgccactgcactccagcctgggcgacagagccagattctgcctttaaaaataaacgaacaaataaataatacaaaacaacaaaataaagagtttaaaagtctggaaggaaagcaacatttacaagggcccaggctcgcccttccctccgagtgaccttgggccggtgacctggccggccagagcgcaggtttgccccactccgggcgggcactgcgggtcgggagctacggggcctggacccgggtgcgaggggcgggggtctccgccgccttcccggcccctgcgctgggggcccgccttgaccgcgcacgcggggctagaatgtactcacttgagcagcacggcggcgcctgctaccgtgcccagcgccgacagcggcagcaggtagcggctcatgccgggccggggacaggcgtcaggcgtcaggggtcggcgcggagcttgctgcacaccagccgcctgggtagctccgaggaagagcgcgcgacgcagccacaggcgagcggaggcgcaggcgcggctgggcccgcgtccggaactgggctgcgaggggcggggcgcgggcggagggggcggggatcctagggacgggacctatgagcatcggtcctgagcgctgtcacagctgggattggtggtttcaggagcctgtgggcgtggctagtccgggggcggggcctatggtttgttcgaatgacgtcacacttgccgcagcgtataaggcgctacgcagttctggagtgaaataggttcgaatcccaccactgtcaattccagactgtgaccctctgtgtgtctttcaactatatcagcctattccctcatctggaaatgtgtgtttaccttcttcatagacttttggagataatttgagaatttccatgcacagaaacaaggatctagtagcctgtgggtacccaagctcctggggtcctgcaggagaaggcggctgggggcctggactcctgggtctgagggaggaggggctgggggcctggactcctgggtccaagggaggaggggctgggagcatggacttctgggtccgagggaggagggccgggtgcctggactgctgagtctgagggaggaggggctgggggcctgattcattcccaaattatcagaatctcatccccatgtctggccctgcacagagatatcttccctgaactctgcctgaactacctttcttagattgagtattgcacacactcctgcacttacctgtccatgtttgtcacccccaccaaaccgggatgcacctctgggcacctgcttccccttgcactgctcacagcgagtgtatctgatcaccacctcctacccctgactgtgcctgaggtgccaggagcagacaccgctggaaacagggaagaattcaacccaatctaactaggagtaagttttcttcctcatcagatgaactgtcatcttcttatatgagccctgccataatggagattatacaggcaggaagagctattttaagaccttagtcaatggccgggcacggtggctcacgcctgtaatcccagcactttgggaggccgagacagatggatcacgaggtcaggagattgataccagcctggccaacatggtgaaaccctgtctctactaaaaatacaaaaattagctggatgtggtggcactcacctgtagtcccagctactcaggaggccgaagcaggagcatcacttgaactcgggaggtggaggttgcagtgagccgagattgccctactgcattccagcctggcgacagagtgaaattctgtcaaaaaaaaaaaaaccttaggcctgtagaccttaagctctcaccatctcaaacgtattaaaccagttacacaatgccaaatgctgtataagaggcacttggaggagtcaaattcatagagacagaaaacagagtggtggctgcagggggctggagatgagattgggaagtcacaggatttgtttttgtttgtttgtttgttttgttttgttttttgagagacagtctcactgtgtcacccaggctggagagcagtgggcgatctcagctcactgcaacctctgcctcctaggttcaagcgattctcctgcctcagcctcccgagtagctggggctacaggcacgtgtcaccacacccggctaatttttgtatttttagtagagacggggtttcaccatgttggccaggttggtctcaaactcctgacctcaggtgatccacctgcctcggccacccaaagtgctgggattacaggcatgagccaccgcacccggccgggaagctgttttttaatagatacagagtttgttttgcaaaataaaaaaaagacctgaaggtggacggtggtgatggttgcacaacaatgtgaatatacttaacatcactgaattgtacacttaaaatggttaagatggtacattttactttatgcatagtttaccaaactaaaaataaagaaaaattttagactgggcatggtggctcatgcctgtaatcccagcactttgggaggccaaagtggagaatagtatgagcccaggagtttgagagcggcctggacaacacggcaaaaccttatctctacaaaaaatacaaaaattagcaggtttggtggcacgcatctgcaccctcagctacttgggaggctgaggtgggaggtctgcttgagcccaggaggtcaaggctatgatgagctgtgattgtgccactgcaccccaggctgggtgacagagcaagaccccatctcaaaaataataataataaatgtttacatttaataacatgggcaattggttcagatgttcattttctcaaccttgaaaaaaaaacaacactgtttttccctgtctttttctccttttctgtaaactgaaatcctaatatcattgacttccaggacagagatcagcaaactttttctacaaacagccagatagtaaataatttcagctttgtgatccacacagtggctgttgcacctcctctgccagaggagctgggaagcagccacagatgatgtgaaaacaagtgagcacagctgtgttcccataaaactttatttataaaaataagcagtgcgccacagttcgccagctcctgtttgagagtctctctccgatgcccaggctggagcgcagtgatgcaatctcagctcactgcaacctctgcctcctgggttcaagcgattctcctgcctcagcctcatgagtagctgggattacaggcgctcgccgccacacctggctgatttttgtatttttagtagagacggggtttcaccatgttggccaggctggttttgaactccaggcttcaggtgatccacctgcctcagcctcccaaagtgctgggattacaaagcgtgagccactgcgcccagctacctgtcattgaatttggaaggatggcatgaagtcattcataacaaggacttaatccatagtaagtgccagaacattgctggctgttaatatggttattataaagagaacaatgcatgcatattcctcctctgaggatctcctacctgattcccagacacacccaagggagttagaacatctgtttggactccaggtgggctgtccacgcctttaccattttcctggttgttaacatgttcctgatcagcactgggtgctgtcccaggtgctgagaggattctcccacaatgccctttgctttccccatcagagggtttatggcacccaattctcattcacattctgtctctcctttctcgttcttctctatctctcctctctctgtctccttttctcttcctctctccctctctgtcttctctccctctctctccctctctcttcctctctctcttcctctgtcctcttttctctctctctctccctctctctcacatctctctttcccttcctttctctttcctctctcttcctctctccctctccctccttctgtcttcctctatccctctcttcctcttttttcttcctctcttcttgtctctttctctcctctctctctccctctttctctttctctctctcttcctctcccttcctcttcctctctctccttctttcttcctctctctcttcttgtgtgtgtctctctctctctgttctctctctccctctccccccaactctctttccctacacacatcttaagaggcctcagcagtgtaaggtaagtttagcgaccctgtggctgtgtagagataagcaaaggggggcaaggagctccagtggtcccagactccagccatttgagtctttgcagcccaagcactgccccagcttcttgacagccccagccatcaccaaagggcacacagataagctgcctccaccaaggcctgtgcagatggtaggtttttgagtaaaatagatatgatccttgtctgaagccactgagttttagaataatttgttatatggccatagtaactggaatgattgctgtaggtttattttattttattcatccttgctgcatgcaacacatgcatggctcagtaactagaaggaaagaagagaagaagggagggagaggcagagggtggacaggagaggatggtaggaaggaaagacaggaaaggagggtgttggtggccttgcctgcaagctgagcagacaccacgcaaacaggtgacctcccagttaagatggaggggactcagggctcaggaggggcagaaggtccccgtgtcggagagctgggcaagctttctgcaggaaatgatggggatcacggccatgtgagccggcaagatttccctcagccagggaggagactccgggctgtgggaacagcttaagcagaaggcatgggacaggaatgcatatgagagatattgtgggaggagggagggctgcctgggctggcatgcagggtatgggagggggtggaagggctgaggcgggagccatcagtaaaaggacccagagcgcggctccaatgccatggtaggaagcttggcgttgactcagagggcgctgggtaccgctgaagagtgttgagccaaggagggtcatgtcacgggcagatacatgttttagaatttcttcttttctggctgagatgtagagtatggactggagagaagcacaggggacataggaaaggtagttctagaaagaggggctgtcccaccagggaaagtcaaccaactgttccccagtatccattcctcccttccagctcatggcactaaagccactgattgattagctgggtgctatcaatctctctctcatctctctctccctctttctctccccctcatctgtgtcttttctctctctcatctctctgtctccctctttctgtccccctcctccgtgtctcctctctctctcttctctgtctcatatctctctcattgctctctccctctttctctccccctcctgtgtctccttctctctctctctttctcccccatctctctttctctcccccttcctctctttctcctctcactcttcctgtttctctctttctctttcttcctctctttctccctgtctctctcttcctcttttcctttgtctctctctctccccccaactctctctccctacacacatcttgagagacctcagcagtgtaagataagtttagctactccacggcctggcacggtagctcacgcctttaatcccagcactttgagaggccaaggcaggcagatcactggagattaggggtttgaaaccagcctggccaacatggtgaaaccctgtctctactacaagtaccaaaaaattagctgggcatggtggcacgcgcctgtagtcccagctactcggaaggctgaggcaggagaatcgcttgagcctgggaggcggaagttgcagtgagccgagaccacacctctgcactccagcctgggtgacagagtgagattctgtctcaaaaaaagaaagaggaggccgggcactgtggctcaggcctgtaatcccagcactttgggaggccgaggcatgcagatcacgaggtcaggagatcgagaccatcctggctaacacagtgaaaccccgtctctattaaaaatacaaaaaaattagccaggcacggtggcgggtgcctgtagtcccagctactcgggaggctgaggcaggagaatggcgtgaacccgggaggcggagcttgcagtgagccgagatcgcgccactgcactccagcctgggcgacagagcaagactctgtcaagaaagaaagaaaagaaaagaaaaaaagaaaagaataaagggagggagggaagggaaaggaagggaaggaaggaaggaaggaaggaaggaaggaaggaaggaaggaaggaaggggaggggaggggaggggaagggagggaagaaaggcaggccctgatgttcagggagctgagagtgaagtcaccggctccaacccaggatccaaactcaagtctgtctggggtcctatccccgtcaccaccccccgccccgacccatcccccagagacctgggaaggagccaggctcctccggtttcaggaaagggctgcacaaaccaccccgccacgatccctcccagagaacaaacagctcccggccaccggcagtctccctcctcctcctgccaggctggttcccagacccaccctccctgtgtcataagcgcctctccccgcactctcaccagggctggctgttctcagaggaacgcccaggaaaaacctacccgaacccctttcagctgggaaggggacccgcctgggcttcctcaccgccgatgagacctccctcgtcgtacacttagagctgcctgtgttttccttccttccttaagcgggctgggaactctagacactcagggatgggccagcccattagagtaagcattcggccacctctaggctgctacggtcactgctgctgtcaccatcaacgtgactgtctcacacctcacttcctccggccagccacacccctgcagatttaacccgccagcctccctaaggtttcctctgcctgaaatcctctctgcattcctggctcattctcgaaattgaggtcaaagctcagatgccgcctccttccctgaccaccctacctgaagcagccgcacctgcctgctcctagtcacgccgttccttcacctgtttcgtttcctccacagggtttaccacaatctgaaagtcttattcatgcaggtgtctacttgtttatctccccaccacacctactaggatgacaatatcacaagggctggggtttcatctgtctcctcctcctctgtatctccagcacatgaaacatgcttggcacactgtaggtgcttaagtatttgctactacatcactttgggattttgcataggacactcccaatgcttagaatgtcaatctttgcttcattgtccttggcaaactcctattcatcctttgaaaccccatccatttatcccttaaccaggaaaggcttctgtgcctcatacaaccacccataaagctggattagggctttctctggggacacccttgccctgtgccacacttccattagcgcacatatcccccatgaattgtgcacaccagcagggtctagagtacggcacacattttgtctcaggagctacgtattgaataaataaattaattactttttttgagacaaggtcttgctctgtcacccaggctggagtgcagtggtgcaatcgtggctcactgtaccttgacctcccaggttcaagcaatcctcccacctcagcctcccaagcagctaggaccacagatgcaggccactatgcctggctaatttttaattttttttttggtagggatggaatctccctatgttgcccaggctggtttcaaactcctaggctcaagggatcctcctgcctctgcttcccaaagtactgggactataggtgtgagacgccacactcagcctcattatttaatatgtaagtagctatatctctctgagacccagccccatctaatttataacctccctccttctcaagaacatgcctcagctcccattgccagggaatctgacctttctccttgtcataggatttttttttttttttgagtcagaatctcagtcagtcacccagcctggagtgcatggcgcaatggctcgctgcaacctctgcctcccgggttcaagtgattctcctgcctcagtctccctagtagctgggactacaagcgcacgccaccacacccagctacttttgtagagatggggtttcaccatgttggctaagctggtctcgaactcctgatctcaagtgatggcctcccaaaatgctgggtaacaggtgtgaggcaccacatccggctgtcataggaatttgtcagcaaatcctacagactagaggatgtgtgttgggtggtgtgggggtggggataacggaggagatggggggtgagctcttcaagccccaggggagaattctgttccgttcctgggacatcccaggtgagagggaagaaaggccagccccccaagacagctatcccagactgggacagaggcaaaccctgaccacagagccctgtcactcacccaagaacaggtgccaatgacagaatagccaggccgaggggggagagaggtgcttcggtgatggatttccctggtgacttgccaagacagggctttactgcctccgccctggactggctgagtcagactgtgcaggggtggacactttgactggtatttgggaggcatttgctgtgggttacagagagggaggggcctcctttgcggccagagaaggaggaaagaggccctgggccctgggacttgggacttgggtggaggctcgggtttcggtctcacctgctgctccagaccatggcctggagggccgcctgcgccacccccaaagcaatgagatagcccctcctccctcagacccaggagtccaggcccccagcccctcctccctcagacccaagagtccagaccccagcccctcctccctcagacccaaaggcctcggacccataccaaatgcttctatgagatagttttctccccttgttcatgaagaaatgagcccaggcccagtcagatctgcatctgtgtcacagcccagggccactgtaaccttaggctactgacttccctctctgagcctctgttttctcctgtcaatggggcaaggggtctgctccttccctcaaaccccaactcaggtacagtcaagcacagaaaatacttgtggcatgaatgtgatgagaacacagaattgcagaagccaaagaaagagaagcgtaagggccctccttccacccctacctcccccacccgctgctacacgcaccaggaccacctgctgggtagccaggagctcacagtctagccccgctggccacccctgcagcccccatccttcactcaggcagttgcagggcccagaacacccctatcttctaggattgacactggctgtcaaactcatccttcaaggtgattcctggcctgccctcctcctccaggcagcctgtcctcctcctccaggcagcctgtcctgaccctcagcagcctctcctggccttggcagagcccctcgtgtcctcccttgcagcacgcatgggaagaaaggccatcgtcctcgccattgctaacaccagccttgcgtttcctctttgccaggtactgtattgacaactctctataacctgactttatcctcccaataagctgggtgtggtgggtggctcatgcctgtcatcccagcacttcgggaggataaggcaggagtatcacatgagcccaggagttggagaccagcctgggcaacataaggagactctactatatatatgtgtatatatatttatatatagtctgagatgggaggatcaccccagtaggtcgagactgcagtgagctgtgattatgacactgcattctagcctgggccacagaactagaccttgtctcaattaagaaaaaaaatggggataataggacccattccataggatgtggtgaggattatgcatacacacacacacacacacacacacacatttatgatgtactgagaagatataagcacacaataagtatctccaaaattatcaagtggcaaagccaggattcagacccacacctgcccgaggctctctgccatcagaccacactatatctctttctctctgttccttcatccccatcaatcgaaggcaaaaatgtgccttctctgatttccaggctcactcagcatagaccgtggaggcaacatatcttgaatgaagcaacaaagcagtaatgcacatgaatgcaccaaatgccaaaagctcgtttactcaacaagtatctctccaacactttctatgtgctagacccaattctgtgtgctgcagattaagtggaggactgatcacacaaaaatctttgcccttgtgaagcttgcatttttttttttttttttttgagatggagtcttgctctgtcacccaggctggagtgcagtggagcaatcttggctcactgcaatctccacctcccgggttcacgccattctcctgcctcagcctccggagtaggtgggactacaggcacccaccaccaagcctggttaattgttttgtatttttagtagagacggggtttcaccatgttagccaggatggtctcaatctcctgacctcgtgatccacacgcctcggcctcccaaagtgctgggattacaggcgtgagccaccacacccggccgctttttttttttttaagatggagtctcgctctgtcacccaggctggagtgcagtggcacgatcatctcggttcactgcaacctccacctcccaggttcaagtgactctcttgccttggtctcccaagaagctgggattacaggtgtgcaccaccaactctggctaatttttttttttttagtagaaatggggttttatcatgttggtgacatggtgtgatctcggctgactgcaacctccacctccggggttcaagcaattttcttgtctcagcctcccaagaagctgggattacaggtgtacaccaccacccccggctaattttcatattttcagtagagacgtgctttcaccatgttggccaggttggtctcgaactcccaacctcaagtgatcaatccgcctcagcctcccaaagtgctgggattacaggcatgtgccaccgtgcccagcctgtgaagcttgcattctaacggaggagacacagacaaaatgaaccaggaacacagtgggtaagaaggtgaaaagttctccacacaaaaatgaagtagggagagaggaaagagactacaaagaagttgggttgccgggggcggtggctcacacccataatcccagcactttgggaggccgaggcgggcagatcacgaggtcaagagatcgagaccatcctggccaacatggtgaaatgctgtctctactaaaagtacaaaattagccgggcgtggtggcgcgcgcctgtagtcccagctactcaggaggctgaggcaggagaatcacttgaacctgggggggcggaggttgcggtgagccaagattgcgccactgcactccagcctgggcaacaagagtgaaactctgtctcaaaaaaaacaaaagaagtcgagtaagggatgccgccatttgaaacagggtggtcagccagtcctctgagaaggtgacattcaggcaaagatcaaaggaggcaagaaagtgaggcatgagggtatctggtagaagagcattccaggcagaggaaacagcaagtgcaaaggccctgaggcaggaccgggtctggatgttccaagagcagcaaggaggccagtgtgctgacacacagaaggaagagatgagatcagaatcacgtcccttaaggccttgcaagatgtcagctttttttttttcttcttttttgagacagagtctcgctctgtcgcccaggctggagtgcaatggcgcaatctcggctcactgcaagctccgccttccaggttcacgccattctcctgcctcagcctcccgagtagctgggactacaggtgcccaccaccacgcccggctaattgtttgtatttttagtagagacggggtttcaccgtgttagccaggatggtctcgatctcctgacctcgtgttccacccgcctcggcctcccaaagtgctgggattacaggtgtgagccactgcgcccggcctgttttctgttttttgagatggagcctcgctctcttgcctaggctggagtgcagtggtgcaattatcggctcgccgcaacctctgcctcccgggttcaagtgattttcctgcctcagcctcctgagtagctgggattacaggcacccgccaccacacctggataatttttgtgtttttagtacagatggggtttcaccatgttggctgggctggtctcgaactcctgtcctcaggtgatctgcctgcctcggcctcccaaagtgctgggattagagatgtgagccactgtacccatgcaagtttcttaacccttctcttcctcattttctcatctgtgagacgaagacagcctcccacccagacacactcccctcacggggctctggggagaaatgatgtggaaagctttgctagtaacctctacagcatggagggagttctggaaaagtgatttcagaaaggtgtttatgcctggaaagcctgttcatttttgtgatgtccttggagctgggccaggcattatcgagctaaatcttagcttttgtcagaataggggggtcattgagggaaatttccaaaggaaggtggaacgggatgggtggggaggtaagggcatgagcagaggcagtgatcgtgggcaggaggtgtccatagaagacgggctgccactggccctggagacagaaggtcagccccgggttcaaatccctccttaaccaagtgctgaaatggacaagttgctcaacctctctggccttcagcttcctcatctgtcaagcaggaatcaaacctcgaacttcctcccgctgttagaatttcaagggagttttaaagacagagctttcaactctgacctgtgaacaagtgtgacatcaaatgtactgttcgttgctattattctgttgctacaaggcagacagttagtttcccagctcccctgcagtccccccagcccctcctagatctgtctgccagccccgccccggggtcactccagccaggctgtgccaggtgaatgctcaggtatgcggaggcggaggcggaggcaggacggccctgggagggagcaggaggaggggccggcagcctggaagggaaaggacagcggagagcagggcagagcctgagcaggcaggtaaggagatccgggtcaggagagaagggggccggggcttgaccaatgggtctgagggacggggggactggggtctggactccagggtctcagggaggacgggctgggggtctgaactcccgggtctgagggaggagggcctggggtcctggactcctaggtctgagggaggaggggctgagggcctggactcctgggtctgagggaggaggagatggggcctggactcctgggtctgagggaggagtggactggggtctggactcctgggtctgagggaggaggggactggggtctggactcctgggtctagggaagagggactggggcctggacttctgggtctgagggaggaggggctgggggcctggactcctgggcctgagggaggaggggctggggcctggatgcctgcattgagggaggaggctggggtaggaattagaggctcctactggccaggccttcacatgtttgctggctcccagggcacctccaggtgggcaggagctaccactcagcaccatgagcaccgccacagggtaagcgcccccggaccccaggtcccagccccagcacgcctcccgcctcccctcgcctcctcacccacacccgcttgcggcagcccagactgtttgcggcggcccagactctggcccaagccccgacactcaggaggaagccagagcctctctcctccctgcccagcctggggttaggggcccccactgcagagcagacaggcctgagctccagttcggccctcacactcagtgctgatgtaaccctggtcagaggacatcacctcctggagcctcagcccctcctctgtgacacagggacaatgttgaaaaattggagggatagtgcattacaggacttagctgaccacctcactgacagcaggtgctcaactcataggagtcgctattgcgattgttatgttgttagtaaatattaaccctttgctagaaaatcagggctgtttataatgaagactcaagtcccccagagtaagcagggagaaaaacaatgagagatgagtcaaaatacctgcatggtaggtagtgagctctctggcccagaggtaatcaaattgtggtgacatcagactggcaggagcaggatgaggaacaggagtttgggaaaaagggtttttcagttcccctgacgccacctgatcgctgagcttctgttatgtgcatgcaagtggggattcaagaattcttaggaaaggtaatcttaggaagaaattgaggacgggaggagacagagaaggatgtggttgggaagcacctggcccatgggagtgggaggggaagcagataattccctgtctacttcagataccactaatgctattataaccattcccatttattgagcaacttctgtgtgctaagccctggcagcatcttaagaatgataataacagttattgaggcttcaaaatacttcacctgcatcatctgactgaatttgcccaacagccctaccagatggttactacgttacagaaagaaaaactgaggcaggagagattaaatcctcttctgaaggtcttatggcaaggaggcagtagacagagggtttgaatcccggactatgccatggtagagatcacactcccctaccacccagcaccaccgcctgacctgacctgtctttttttttttttttttttttttgagatggagtctcactctgctgccaggctggagtgcagtggcacgatctggactcactgcaacctccgcctcccaggttcaagtgattctcctgcctcagcctcccacgtagctggcactacaggcgcccaccaccacacccagctaatttttgtatttttagtagagacagggtttcaccatgttggccaagatggtctcaatctcttgactttgtgatccgcccacctctgcctcccaaagtgctgggattacaggcgtgagccaccgcgcccagcctacctgtcttcttaaagtccagctctggctctgagctctcctgctcaataataataataataataataataataataataataataacccttccatcgctccccattaccttcgtcatgaagcccttgctgccctgcttggcatttccacaggatctgcccccagtcccacagtctctctcattcctcttttcttcaccagcccagaagctgccccaaagccaagcgccaagtctatctatggtgagcggggggcaagggagccccaggcccatagaactgggtctaaagaaacaggacctggcatccagggtcttggaggaggaggggctgggggtctggactcctgagtcagagggaagaggtgctgggggtctggactcctgggtcagagggaagaggggctggggggctggactcctaggtttgagggaggaggggctgggggcctggactcctgagtcagagggaagaggtgctgggggcctggactcctgggtcagagggaagaggggctggggggctggactcctgggtcagagggaagaggggctggggggctggactcctgggtcagagggaagaggggctggggggctggactcctgggtcagagggaagaggggctggggggctggactcctgggtcagagggaagaggggctggggggctggactcctgggtcagagggaagaggggctgggggtctggactcctgagtcagagggaagaggggctggggggctggactcctgggtcagagggaagaggggctgggggcctggactcctgggtcagagggaagaggggctgggggcctggactcctgggtcagagggaagaggggctgggggtctggactcctgggtcagagggaggaggggctggggggctggactcctgggtcagagggaagaggggctgggggcctggactcctgggtttgagggaggaggggctgggggcctggactcctgggtcagagggaagaggggctggggggctggactcctaggtttgagggaggaggggctgggggcctggactcctgggtctgatggaggaggggctgggcctggactcccaggctcattctctttctcccctggcagagcagaggaagcgttactccacagttgttatggctgatgtatcccagtacccagtcaatgtgagtctggggtctgtgttcccccaggacatcttctggggcaaaggtggcctcaggagatagggcttttgaaagcagctaggcccccaagcaggaagcatgtggaaagtcagtttgcccatccataaaatggacctccgttgcctcacctcagtcatggatatgaagccaggggcctcgggtccacttaatctgccagcctttcctccaggccagctgttgtgctggacagtgggaccacggaggcaaatcaagacacagccctgcatgaggaaggggtagacaaggtccagaggaatccacagaggcgcctggtgctctaatggaggtggcagggggcatggcaggagacccgaggaggcatttagaaggagagagctataatccagactccttccctgcccgcaaggagcctccagtctgtgagaagccagactcaggtgctagtcactctgatgaaagggaaacaaagggcactgggaggaggag

SEQ ID NO: 390 - DNA, 38578 bp, Homo sapiens
ggtggaggttgcagtgagtcgagatcgtgccactgcactccagcctgggcgaccctgtctcaataaaaagagcaagagagtacggatccttcatagacagagtcgggcattcccaaaagtaagaggaggaatgtgtccaccctaggtacattagttgtttatatacaggataaaaaagatcatggagagatgtgctctgctacaagggtttttgataaaggattaattttcttaatcaacatattttgcaagaatcaatgttattatttttaaagcaaaattagaaatgcttctgttctcaaaacatcaggatgaggccaggcgtggtggctcacgcctgtaatcccagcactttgggaggctgaggcgggcagatcacaaggtcaggagatcgggaccatcctggttaacatgctgaaaccccatctctactaaaaatacaaaaattagctgggcgtggtggtgggtgcctgtagccccagctacttgggaggctgaggcagaagaatggcatgaacctgggaggcagagcttgcagtgagccaagatcccgccactgcactccagcctgggtgacagagtgagactctgtctcaaaaaaaaaaaaaaaaaaaatcaggatattaggacactcccacatctgggtctgtttagtaaacatctagaggctaggagtacctaagtttctggaaatgcagcccagcaagtcccagcctcattttcttcgccctcaccaaagatggagtcgctcaggttcgaacaccatgacagtttcagttactcgtggtcaactgtggtctgaaaataggtgagcatagtacaattaggtaatctgagagagagaccacatccacataacttttattacagcatatggttataattgttctattttactgttagttattgttgttaatcttttactgtgtctatttatatttatatttttatgtatttatttatttttgagacagtgtctcaccctgtcaccaggctggagtgcagtggcgcgatcttggcttactgcaacttctgcctcccaggttcaaacgattctcctgcctcagcctcctgagtagctgggattatcggtgcctgccaccacagctggctaattttgtatttttagtagagacgggtttctccacgttggtcaggctggtctcgaactcccaacctcaggtgatccgcccgcctaggcctcccaaagtgctgggattacgggactgagccaccgcgcccagcctactgtgcctaatttataaagtaagctttatcatagtctctatgtgtagggcaagcttgtctgacccacggcccatgggccatatgtggcccaggatgactttgaaagcaacctaacacaaattcataaactttcttaatacattaggagggacgggcgcggtggctcacacctgtaatcccagcactttgggaggccaaggcgggcagatcacttgaggtcaggagttcaagaccagcctggctaacatggtgaaaccccgtctctactaaaaatccaaaattagccgggtgtggtggtgcacgcctgtaatcccagatactcaggaggctgaggcaggagaattgcttgaacccgggaggcagaggttgaagtgagcagtgatcatgccattgcactccagcctgggcaacagagtgagactctgtgtccaaaaaaaaaaaaaaaaagaaattttttttaaagttcatcaattattgttagtgtattttatgtgtggcccaagacaattcttcttcttccaatgtggcccagggaagccaaaagactggacaccttggtgtagggaaaacatggtatatagagagtttggtactatctgtggtttcaggcaccaattggtggtggaggaggtcttagaaagtaaccctctgagggtaaggtgggactactatttctaagcatttgggatgggagggagaggctctgacaggtattcagcttgcagtcttggactggaaccatctcctacagtgctctctctaccataacttgccccatgtttgtgataggcaggaaaatggctcccctcccaaagatgcctatatccgaatctccagagcctgtgaatatgttatgttacgtggcaatggagaattacagatggaattaaggctgctaatcagctgaccttaaaatcattttctttctttctttcttttttttttcagacaaggtcttactctgtcgcccaggttggatgcaatggtgcagtcatggctcactttagccttgacctcccaggctcaagcaatccttccacctcagcctcccaagtagctgggactgtaggtgcataccaccatgcttggctaatttttgtagttttcatagagacggggtttccccatgttaaccaggccggtctcaaactcctgggctcaagtgatccacctgccttggcctcccaaagtgctgagattacagatctgagccactgcacctggcctgaccataaagtagggacattatcctggattatccaggtgggcccagtgtaatcacaagggtccttaaatgttgagaggggcaagagagttagtgtcagagtgatgtgatgtgagaaagactcaggcagccattgctggctttggagatggaagggggtcacaggcaagggaagacggcagcctcttgaagctggaaaagacaagaatacagattctctggccaggcatggtggctcacacctgtaatctcagcactttgaaagcctgagacaggaggatcacttcaggccaggagttcaacaccagcataggcagcatagcaagaagccatctctacaaaagatcaaaggataaaaaattagctgggcatggtggtgcacacctgtggtcctagctacttgggagcttgtttggaggttctagcaggggtgcacagtactcgtatacccttgaccaaagaccagtcctcctctatcggggacggtcatcttcttcaactgagcgcacagcttcaggagggacgcctatggagaggtgagggaggaaggagacacccgcctagccagccagattagccgaatcaaccttggtgatcaatggggtgacagaagttgcagtcatattacccttacatccagtcctagctgcttgggaggctgaggcaggaggatctgttgagactgggagattggggctgcagtgggccatgatcacactactgcactccagcctagccaacaaagcgagaccctgtcttaaaaaaaaaaaaaaaaaaaaagaatacaggctctcccctggcgagaaagaaggaacacagccctgctgacaccttaattttaacccagtgtgacccattttggacttctgaccttcagaaatgtaaagataataaattttgtcattttaagcaaccaaatttggggtaacctgttgcagcagcagaaggaagctgatacaatgtaacatgactggtggtgtctgctcttccaccacttggctagcttcttgagaacaagaacacctttgtctcctgtatttacctagaatccttttttttttttgagacagagtttcgctcttgtcacccaggctgcagtgtaatggcgtgatctcagctcactgcaacctccacctcctgggatgaagtgattctcctgcctcagcctcctgagtagctgggattacaggcgtgcaccaccatgtctggctaattttgtatttttagtagagatgggctttcatcatgttggccaggcggggctcgaactcctgacctcaggtgatctgcccttctcggcctcccaacaagtgctgggattacaggcatgagccaccacacctggcctattcacccagaatctaacacaggatctggcacacagtcagggctcagtaaatacctgttgaatgaacaaaagaccgaaatacagctccagctttgtggttctccagaggttttgagcgtccaaagcagcctctacgcttaccctagtcctggagaccctaagccatgtgatctcagttttctcgtttcctttcccccattggcccatgcttaacactgcaaggctggctgctattcttttgtttgtttgtttgttttgagacagagtctccctctgtcaccaggctggagtgcagtggcatgatctcagctcactgcaacatccgcctcccgggttcaagtgattctcccgcttcagcctcccaagtagctgggactacaggcgtgcaccaccatgcccagctaatttttgtatttttagtagagatggggtttcaccatgttggccaggatggtctcaatctcttgacctcgtgatctgcccgccttggcctcccaaagtgttgggattataggcgtgagccaccgcgctcggctgactgctattctatgtgcagtttcctcccttgctgtggatcattcccctcctctctctggccatgtgtgtagggagcactgagatggaagacacttgtcacatactataggtgattttgccaaccagccttctgcgggttatgcctgaaacagcaggttgtgttttccttcctgtctcggattctgtccgctttcctctcttctccatagccacctctatccatattttctatcaggtttctgtcctttgaagaccaattcttttcttttttttttttttttttttttttttttttacttatttacaatattcttcgggtcttcatctctccatttcctgtgtcctgaatgaagcgcatagttctggtctttcttatagcccttcttaacccccttctcaaatggttccatggctttccgggatagacaatgaaaataattaaagacactctcatataacgtcgggtttactgcagagctcctcatggaagcactcagtttattttatgcagaatggtcaactcctctcataaggggagagtggagcggctgctgggtcactggaatattgttattctgttgctttcttttcagtcagtcattctcaggccccagcttctctgatttctcggtgagcttagtttctgcctccccagctttccctctgtgtgcctcaaattaaatctcttccggaaccaggctctgatgagcgtgcctggtcatggtctaactcggagttctcatgccagacctcctccagtgtggctgatgtgtcctgtatgtttttgactttggtaactgagttaattcctgggccagtcttttgtggccaagtctagtagcagagccaaggttacttatagaaagaactacctccggccactcatcctggggctgtggctactaggcatacggattcctctctggtacaaactctttttaccaaaactatatttggaggtaatcataccttttcattctcttccatccttccccctttcctactacacaaagatagcaagttttttcaccttgttgcccaggctggagtgcagtggtgtgatcacaactcactgcaaccttgaactcctgggctcaagcaatcctctcgcctcagcctcctgaatagctgggactacatacacccaccaccatgcccagctaaagatagcaagatgatgaaacaaatagatcatccaatttcaccccccttcacccccaacccaagtgtaacattttcattttggtggaatccgtaggtctcagttatctgatcttctgttgggggctgcagcatcagaacagggaggtctagacccaggacaatggcttgtatcctaaaggtgaaatatgacttctgttcccctgtaggcaaggatcctgggtctcgcatggttcaaggtatcagaaataagcaggatctgagatctatattatgcggctggcagtcattcttcattcttgtatgaagatactctcttctcccttcttttttccttttctttcttttttttttgagatggagtctcagtctgtctcccaggctggagtgcagtagtgtgatctcagctcaccgcaacctccgcctcctgggttcaagcgattctcctgcctcagcctcctgaatagctgggactacagatgcacactaccacgcctggctaatttttgtagagacaggattttgccatgttggccaggctggtcttgagctcctgacctcaagtgatccacctgccttggcctctcaaagtgctgggattagagtcatgagccatcacgcccggccttctcccttcttttcatccccgaaacctaagctagtaaccagcacacctttccttaccctcttttatcatcagcactttgcacagcctactccaggaaactcggggtggtagggaagctaccagcagcagctctctctccacacaataacatgggcgtggagccccaggcagatgagtagtgcctccctagtaccagagtgctaggaattctttgtcatgtgcagctggtgttggtgcttagaagaaccaactggacatttctgattttaggtggagtaccagtcctggagactaaaacttagaagagtgtttgcaagttaacagagtgatatcatagcatgtcttcgagaaacacagactcattgatgatagtatgaaattatgtaatagcagcccatacatgttatgctactttacagcaacatgaatttttgaaatggcattgcatactttttttttttttgagatggtgtcttgctctgtcacccaggctggagtgcagtggtgcgatctcggctcactgcaagctccgcctcctgggttcacgccattctcctgtctcagcctcccgagtagctgggactacaggcacccaccaccacgcccggctaaatttttgtatttttagtagagacggggtttcaccgtgttagccaggattgtcttgatctccttacctcgtgatctgcccgcctcggccttccaaagtgctgggattacaggcgtgagccaccgtgccaggctgcacaccattttaataaagagaattttttttttttttttttttttgagaaggagttttgcttttgctgcccaggctggagtgcaatggcgccatctcagctcactgcaacctctgcctccctggttcaagtgattctcctgcttcagcctccagagtagctgggattacaggtgcctgcgaccacgcctggctaatttttgtacttttagtagagacagggtttcaccatgttggccaggctgatctcgaactcctaacctcaagtgattcacttgccttggcctcccaaagtgctgggattttgggtgtgagccactgtgcctggctgggtcatttttaatgtcctaaagttctcttgttctcttcacatagatctggcatatttctcaaaatattataagcatgtgtgtatttgtatttatatctataatttattgattttttggctgctatgatgaatgggaatttttttcccttttagatttgctaatctagacttcattttgtaaaggttttgtcttagttgaagttcttatggtagcaatttacagaaatacattcagattaacttaggccaaaaaaaaaaaaaaaaaaaagcgggggagaattctctggaaggcagccaaggcctcccctacaggccaagggtagaaaggagagtgggcctcacaagggggagggaaacaagaactacggagtctcctgttgctttcccttagtagatctatttttctctccctctgtagttcagctttctttgcttctccctttgtccacttccatgtttctgagaagcaaagggatatagagcaaacctggctacaggggctacccatgtgggtggagcaattctcagaaaataactatgggttgaaaaggcacggctgaaacagatttcaagacactgcaatgtcagtgacttgaaaagaatctgtttcttgcctaagaggggtagagttggcagttactgtttgggagaatctgcccttctaagttccagatgattaataaacagggactgacaatcgtcaggttatgggattaataattcaacaaaatatactgagctcttactctgactttatatttgcatactagttagctgttgtaggggctgaaaagttgtgatgcctttcttcctcatcataagggtcagagctcgtataacaagataggttaagagaaaaatctaaaataaactaagaagtttatttaatcaaagttttacatgacatgggagccttcagaaatggctacccaaagagccagggaaaacttgtttttaatgcttagattctatgaaaaatggacagcctgcagtaatgtggttgggcaaaaagtgtgccacttaatagtaacagacagcaggtggaaacccaacgaggtctttctgtgtagcattccttcctcccaggtatgaggcaggatctcttccagaatgagggtcttacggcctatcagacaaggtaggccagagaagttctttacggccagcttgttttttggactgagtttccctcctgttgcccaggctggagtgcaatggcgtgatctcggctcacagcaacctctgtctcccgggttcaagcgattctcctgcctcagcctcccgaatagctgggattacaggcatgcactaccatgcccggctaattttgtatttttagaagacacagggtttctccatgttggttgggctggtctcgaactcccgacctctggtgatctgctggcctcggcctcccaaagtgctgggattacaggcgtgagccaccgcgccaggccacggccagctcttacatagaaaggtggggggaagtttaggttttatggctggctttgggggagagggcttctagtttctgtgactcatcttggggaagaggaattctggtttctatggcttgccttggggaagaaagaaggctgggagacaggagggcaggaaaaggtcggagagactgtgcctgaggccttccagtctcttttagttcaaaatagtcagcataccaaagcgccgtattttggggtattgtttttctgagctcaacactgctgcttcggatgtatctccacttactttatttaacctaaaaggctttcagctcagagcacaagtagtatgccatgaatgcgaaattgtgtggttcaaatattcaaaatatttgaaatatttgccatttcaaatattttgtcttgagaaaataaaatctttcaaatctggcaacttgggataaagatgactatgatcctatccctcctttcaactggcttaggattcattttgattttcctctgtagaaatggggcgcttcatgaaagaaactctctctgaaaaccaggaattctgttaaaagacctttttgctaatctagttcagtagttgacgttagcatttgacggggagcctggtgaaagctaccatgagaattcggaagcaagaaactggcagtcctggcgctactggttactaattgaacgaccttcgcaagtaacctagcctctgtgaacctgttctcattttcaaacgcggttgaataactacttttcaactaggatgttatgaaaggtaatagggtaaagacaaaggactaggttcgcgtggagcccagtactgctgaaggaaagatacacgagtttggagggagtctaaggaaaaggaggcaaaggaccccggaggttatatcctcggtggcctcagcttttacacgatctaagtccatcctacggcggatacgctctcctttcactggaaaatgactgtttgcgttgaaaaaatttttatctaacaaagctccatttctctaaactttgcttccccgcccagtttgcaaacgagtcagggtttcctcaccggcgcggtaggctcgccgaaagccaagcgggagccccaggctgcgcagggcgggggaataatgggtgcccagctccgggccaggaagcccagggaaccactgcagccaccaccgcggtcaggagacagcccccgcaccgccccttttcgattcgtttgcatgatctacggcgcggtttccggcggcagagacatgttttccggtcgtcccttggctcgattttcttccggggcgggacttcctttccatcattgataggcgccgggcagctgagctggtaggaggaccagacggggaggttcggtatgtctgaccaggacttatgttcctcgaaagggcggccaggaggatgctcttcctctcttttctttctcgcctttttctccgcatgacgcctcggtttgcgcggacgccctgggcttttggcactaccgcccacctgaggctcttccgcttcctctttccccccccaggctccgccccccagcgtcccgtggccatgacgaccgctcagagggactccctgttgtggaagctcgcggggttgctgcgggagtccggtgagtggacttccggttgggctgggcctcggacctcggacgaggtgggggtggtgctttctggagacacgccctgagagtcatggagttacgactggtagggtcaccaggtgtcagagttcaatttctttacttttcccaggtttgttcgcccttacagtgtcctttgcctgtgatagcctaaactctagccgtcctttgaggccaaagggcggtatccctccctccgtgccttctctgacactgtcagaaggaagtgatcattacctgactaaaagcccctcaggaccagggactgatctcggtcataatcattattgtgtagcaaggtactaaatacagtagatagaagcacgagatttggagtcggacccacttgggttggaatatcaaccctctttcaaacttgccatactgtttcctgaggctcagttttcctcacagattggcatagtgattgtacttaacatttgtggggattcgttttaattcatgtatttagtacaatgcctgcaagtatagtaactgcttacagttgggagctattgttattgtaatgatttccctgatgcttggcactgtgcctgggcataatggagccacagtagttgttgaatacttggttggcattagttgtggtagaaaaagccttggctttgagatcagataggagaagtaacttcctaccaattatatgatctccatcaagatttttcacttttttgaacctcaattttcatatctgtaagatggggttaatagtgcttctctttgagagattctgagaaggtttgaatgagataccaaagtcatctggtacatactacagttaatgttagctgtcctccatcactccatgctcctattgacgatatctgtggaagctctctttatagcagttttcttttctttcttttcttttttttgagacagagtcttgctgtgtcacccaggctggagtgcagtggcgcaatctcagctcactgcaacctccacctcctgggacgaagtgattctcctgcctcagcctcctgagtagctgggactacaggtgtgcaccaccatgaccggctaatttttgtatttttagtagagacggggtttcaccatgttggccaggttggtcttgaactcctgacctcaagtgattaacctgccttggcctcccaaagtgctaggattaaagtcgtgagccacagcacctggccagtagcagtttcatttcctggcttgtattgataactttgcaaatgtcttatatccttctctgggaggagacaactaggaggccctttgaacgtgggaagagtccttgaaccatgtctgtatctatcctcagtgtctagtacatacagaatccttcatgtcaggttgtaggacttgttaatttattcagtgatgaatggtgggtgtgtgaatgtgtgactacaaggaggtagcaggagaagagctttgtggcagcagaatagttttgtatcttgattgcgtggctgcaggaatttatataaacagcatatagctatatatacatattgtaccaacatcagtgtcctgaatttttttttttttttgagatggagtctcgctctgtcacccaggctggagtgcagtggtatgatctcggctcactgcaacccctgcctccctcccaggttgaagtgattcttctgcctcagcctcccgagtagctgggactacaggcatgcaccaccatgccctactaatttttgtatttttagtagagacggggtttcaccatattggccaggctggtctttaactccggacctcgtgatccacccgccttggcctcccaaagtgctgggattacaggcgtgagccaccacgcctgccctttgtgtttttttttttgtttttgtttttttttttttttttttttgagatggagtctacctctgtcacccaggctggagtgcaatggctcaatttcggctcactgcaacctctgcctcctggcttccagctgttctctggcctcagcccctcgagtagctgggattacaggcgcatgtcgcaatgcccagctgagaatatttgtatttttagtagagacgaggttagagtcgtagaataattttttgtgtttttagtggagacggggtttcaccatgttggccaggttggtcctgaactcctgacctcaagtgccttgctcccaaagtgctgggattacaggcctgagccacggcaaccagctcagtgtcctgactttgatattgtactatagctatataaaatgtaaccattagggaaaactgggtaaaggatacaggggacctttctgtattatttctgcagcattctttgactccatacttattatattttttaagccaaaaaagcattccttcatgcctagcttgtagctgcacttttttaggtgcagtgatgaataccagagtgatcaaaagatgccctcaaggatgaaagtctcattagagagagcagttttaacagacagcaataacaatgccttagtgctataatgaatagttattctatgacatactttttagtattgtttgaaagtttctacagatgtgctttgcaatcagaaaaagaaagaaagataaaacttccaattaacttttgtgtaataatgagtgactgcaatatgaaaattcagcagtattacttcttgaggcggcttcctggaggaggctggtctcaagctgggcggtggaagggggtgtctcataacaagagagaactgtgaaccaagctggctgtatttccagcactgtcagtagatgaggctcttttgagcagaaggtgaaagaaaatttggaagagttggttggagttgtgtagccaagcagtctcatcaggctgaatgaaatgttaggactttttttgaagatgaggggagccattgaatgcttttgagctgagaaggagatagaaaatttgatcctgcaatagaagatctacaatatggattggagtgggtatattttggcatcatagagccttagaataaagagaaaaatcttttcactgtgtcttccctcctgtttgcccctttttctgcaggggatgtggtcctgtctggctgtagcaccctgagcctgctgactcccacactgcaacagctgaaccacgtatttgagctgcacctggggccatggggccctggccagacaggctttgtggctctgccctcccatcctgccgactcccctgttattcttcagcttcagtttctcttcgatgtgctgcagaaaacactttcactcaaggttctgggtgtggggaagaggcaggatgtgcaaggagcccaagagaatgatggaagttggggatagggtaggggtgcagaagtctgcagtgccaggatccagagggtgtcagaggtaccagtggttgtgctaaggaaggaatgttgagggcaggaagatctgctgtgcctcagtaaattgagtttttttttttttttcagctggtccatgttgctggtcctggccccacagggcccatcaagattttccccttcaaatcccttcggcacctggaggtatggggacacggggggatgttggtgcacagcacccaacttgaggcagccccttggggatgggaaagagaagagcctctttggtgaggaggccaggcctgagtatacccattgctctgcagtcatgtgatatccactgtctttccatttactgcttccctaaatcatagctgggctttgtggtcttctccctcctcccaactaggggatggggatgaggtctttgtcttctgtggggttctgccttcctccctcctctttccttgtcccagctccgaggtgttcccctccactgtctgcatggcctccgaggcatctactcccagctggagaccctgatttgcagcaggagcctccaggcattagaggtaaggagagtgaggggtgagctcagacacctcaacttgagagatgtagaagaccaagctctgatgttctcccctctctgcagctctccctgcctcctgcttccctctagacagtgtcctcactccctctctgtgttcccgcagcactctgtaactgcctgtatatttatagtcgtacctaccatattatattacatattctagtgtctaccttcccactgtccctacagtgagttcttgggtcagggacctgggctttaagcctgtatcttcagatggagttcagtgtataaaaaatgaatgagtgactgggtggtagagcttggccttggcatagggaggaaggggagggtggggtaatgaagcacccatctgtctgctcaggagctcctctcagcctgcggcggcgacttctgctctgccctcccttggctggctctgctttctgccaacttcagctacaatgcactgaccgccttagacagctccctggtgagtgcctcagagggaagagggtttcgaggaagggcaaggccaggcctttggggaggagggccagctggttgaccagatagtattgtagtgaacatcgattctctgcctcctccccgtctctctcagcgcctcttgtcagctctgcgtttcttgaacctaagccacaatcaagtccaggactgtcagggattcctgatggtgagtatgggcagtttggcagctggcacaccatgggtctttgattgctctgctctcactctctctccttgaccagcttttactcccaccttgctcttgccatgagggtggagctgcattctgggagatagcactgcttagacactagcatcagacaaaccagagttcatatctcaacttctaatacctgtgcaactttgagcaagttagttacctcttggtttctttacctgtaaagtagaaatcacaagagtacctggtttttttttttttttttttttttgagatggagtctcgctctgtcacccaggctggagtgcagtggcgcaatctcagctcactgcaacctctgcctcccaggttcaagcaattctcctgcttcagcctcccaagtagctgggattacaggcacgtgtcaacacacctggctaatttttgtatttttagtagagatggggtttcaccatgttggtcaggctggtcttgaactgctgacctcaagcaattcacctgccttggcctcccaaaatgctgggattacaggcatgagccaccacgcccggctgaatacctgcttttatagtattaaaatgattgtgaagaagtacccaatgttgcttagtctagtgcctagctcagaaactggtagcttttgtgattatgatgaagaacctttcttctgggtcctcccatccacctgtcagagataaagccgaactagttaaagtggtaaggacagattttttttttctttttttttttgaggcagagtcttgctctgtcacccaggctagagtgcagtggtgtgatcttggctcactgcaaactcaacctcctgggttcaagcagttctcctgcctcagtctcccgagtagctgggattacaggtgcccgccaccatgcccagctaatttttgtattttttagtagagatggggtttcaccatcttagccaggctggtcttgaactcctgacctcatgatccgcccacctcagcctcccaaaatgctgggattacaggtgtgagccaccgtgcccgaccaagtaaggacagattttttatcagtgataaactattgcagcggggaagagggtgcaacctgaactgaacgccacttcaatttgtgcagaggtggctgggcattttaaaaggagagtgagggaataggaaggggaactgtgagggcttgagcagagtaagggaagtggaaatgtacgaaaagcagaagtggaggttgattcacatgaagcccttctgggtttgctaaaagttaggctcctaccttcccacagagactgggagatgggagccctgtcatcaggtgttggctagaacaaatgggaaattcttttggcagccttgacttttcccaggcaggagcttaagggggctagagtcaccattctagggatgcatccttgagatattagaactttgctgtttttgttcaggttttttactgtgggggttggaggagtcaacaaaaataatttgtgttgaattttgttgaacttgtgctgaacaagtctgcagttcttaacaggccaaagttgaggcctagtcaaaaagaaggcccagaggagcctgagtagggtttgatcaaggtgagaacctcctctaattcagggaaagaagagacactcctctttcccctgaacaatataaatccttttcttccttgatcaccttttgttcactaaaaaccaactgagccatttattgggacttggtagtggatgaattttgctggatggtgagagtgaccaggcatttaatgggggacatttctatggaaacaaaaagggaaacaaagatgaatggttggagcagactataaatccattttctgagtccagagggcagccagttgagatttctaggtgttgagctctatgtttctttagatggtggaatgaggatagcagtggcaaccgatggatttcttcgtttgtagtttgaatgtttgtggtgatagcatagacagtgttgcagtcacggttatttccctgaacagagcctggaagatacagaagtgtcagtggacttttttcctttttttttttttaatgagacagagtttcgctcttgttgcccaggctggagtgcaatggcacgatcttggctcaccgtaacctctgcctcccgggttcaagcgattctcctgcctcagcctcccaagtagctgggattacaagtgtgtgccaccacgcccagctaatttttgtatttttagtagagacggggtttcacaatgttggccaggtgagtctcgaactcctggcctcaagtgatcccccctctttggcctcccagagtgctgggattacaggcatgagccactgcacctggccggctgggcattttaaaagagggcggcggggagtgggcaggggaatggtagggccttgagcagagctgggggagtggaaatcaggttggtccacatgaaacccatctgagtttgctaactaactggcacttaccaaaataaggcccttaccctttcacagagactgggagacggggccctatcttcaggagttggctgaaacaaatgggaaattcttttggcagctttgacttttcccaggcaggaatttaaggggcttggagttgccatgctcagggtgtggccttgaactgttaggaacagtgctggtgttgttcaagtcttttaacgtgggagtaggggtggatgaaatcatttgtgctgagtgtgtgcagttttatataggccaaggttgaggcctagtccagaagaggtctcagaggaccctggctagagtttggtcaacgagataatctttttctcccctgtacccctgccaggatttgtgtgagctccaccatctggacatctcctataatcgcctgcatttggtgccaagaatgggaccctcaggggctgctctgggggtcctgatactgcgaggcaatgagcttcggagcctgcatggtgagtgggggtgtgtgatggggcaagcatggaggggaagggggagagtgaggctggggctggcctggggaccatgtgcctctagagccttgagagggcttatggggagtgcaggggtgctctggccggtctttctgctgcaacctcccccagtgcatgcaccacactcacttgcgtgtactcatccacatgctcttccttccttcttgcgtccaccccaggcctagagcagctgaggaatctgcggcacctggatttggcatacaacctgctggaaggacaccgggagctgtcaccactgtggctgctggctgagctccgcaaggtgagatgggaatgcatcaggggcctgggaaccacccttgcacgtacccccccatgctggtttggtcagtgccttcttcacacagggagggccagggccccaggccctcctcattctccccttcctgcccctcagctctacctggaggggaaccctctttggttccaccctgagcaccgagcagccactgcccagtacttgtcaccccgggccagggatgctgctactggcgtgagtgatcgtcctgtgtccactcttcttcccctttcctgcccagtcctcccccaccttgcaccctcttgccatccctgggtgaggggccaaggacctggaccctgcttactgtgttcttaatacctggagctcagcaggatgggcctaccacatactccctccccctttttgtctttgctcagttccttctcgatggcaaggtcttgtcactgacagattttcaggtcggtgtggttggggggcgaggactgttgggggaagacacgaagggagggcgctggggagagaacagagggctggctggtgacagggtcttcctggtcagtggaaagtagggtcccgccttttggctggcttgggcaaggcagaggtgctcccaggctccaacctctctctccttcctgtcgtcacgtgccagactcacacatccttggggctcagccccatgggcccacctttgccctggccagtggggagtactcctgaaacctcaggtggccctgacctgagtgacagcctctcctcagggggtgttgtgacccagcccctgcttcataaggttaaggtaagcagcgtcctccgctgccttgtgcctgcggttgggtgtctctccggggactctgggctacagtgggcagggaatggtaggaactgtgcttgcacgtggtcaaggtttctttgataggttggatggccagccgtggatggcagggctggaggcttggctttcacagaacttcttccctccaccaacctcagagccgagtccgtgtgaggcgggcaagcatctctgaacccagtgatacggacccggagccccgaactctgaacccctctccggctggtaagtcagcttcatcccactaacctctctcgtccccagcgagctcactctaatttttaagttacagtgaagatctgctggaagaaatgttattttttgttggggtagagtattatagagggcttcttagtcttttttcttttcttttagtttagggaaaggagaagactgcttctgggagcattttgaaaacttttcgaggaacattaattttgtggggtgtcaagagatcatgtaggccaggtgcagtggcttacatctgtaatcccagcactttgggaggctgaggtgggaggattgcctgagcccaggagtttgagaccagcctgggcaacatagagagatgtccatttctacaaaaaaatttttaaattagcctgacgtggtggtgtgcgcctgtagtcctagctacttgggaggctgaggcaggaggatcgccagagcctgatagttcaaggttgcagtgagctatgatcatgccactgcactctaacctggtgacagagtaagaccttatctcttaaaaaaaaaagtaaaaaaccccaaaacaaaagaaagtgtatatgtatatatataaaataataggattgtggccagagaagtttgagaaatgtgaggttgaagagaaataggtgtgtcagctgccggccgtctcgggcccttcaggatgctatcatgtatgctgagtctctggaagtagcataggatgcgcagcttggattgcatgtgaccacagggttccataggacacgctttagtacatgccgcggaggggacgcctgtagcctcccttgcccgtgtccccatacacagcccatcgccccctcatcgctgaggagcaccgttgaaggatttggggccatctgtgtggggcaggcttgctcagttctgggttcccctcctgcctaggatggttcgtgcagcagcacccggagctggagctcatgagcagcttccgggaacggttcggccgcaactggctgcagtacaggagtcacctggagccctccggaaaccctctgccggccacccccactacttctgcacccagtgcacctccagccagctcccagggccccgacactgcacccagaccttcacccccgcaggaggaagccagaggcccccaggagtcaccacagaaaatgtcagaggaggtcagggcggagccacaggaggaggaagaggagaaggaggggaaggaggagaaggaggagggggagatggtggaacagggagaagaggaggcaggagaggaggaagaagaggagcaggaccagaaggaagtggaaggtgagccctttgtgggctggggcgagctgaggccaggggcccttgggatgtttgtgagtggtggggcctggcgggtggagggccagttcgggggagggcagagtgtgggtactttccctccctgcaggccttttctcttggtctctccacagcggaactctgtcgccccttgttggtgtgtcccctggaggggcctgagggcgtacggggcagggaatgctttctcagggtcacttctgcccacctgtttgaggtggaactccaagcagctcgcaccttggagcgactggagctccagagtctggaggcagctgagatagagccggaggcccaggcccagaggtcgcccaggcccacggtgagtggggcgtggcagggtctctggaggagccagttatgggaacatggctgttgtgtgccctgcactgggctgggcatttctttcagtctctccttggcactaggagccgaggaggggagcctcagaggttgcaagcactcgggaagctgggctgaggagcagggattctgtgctggagcttggacgtcagtacaggcctttgacaggcttcagaggtcctgccatcctccatgctctcagcatcccctcatccctctgatcaccgcccctgctgtttttcacccggtccccctcttgctgcgcagggctcagatctgctccctggagcccccatcctcagtctgcgcttctcctacatctgccctgaccggcagttgcgtcgctatttggtgctggagcctgatgcccacgcagctgtccaggtgatggcgcccagagtgggggcccaggaggctgtggggattaagagagccagagggaagtggcagcaggcctgagggccgggggcctgtgggaggtgtccgtctggggtccgcctgctcacagctgcctctgatccaccctctgtcaggagctgcttgccgtgttgaccccagtcaccaatgtggctcgggaacagcttggggaggccagggacctcctgctgggtagattccagtgtctacgctgtggccatgagttcaagccagaggagcccaggatgggattagacagtgaggaaggctggaggcctctgttccaaaagacaggtacaagtcctgcccttgacctctctgcccacacgcctcccctgttccagggaaagtggctctgtgtaggggagtgtgaagggggagccctagggagaaggggctagagtggagagcagttgttctgcctggaggaaaaagaaaaccgtctgcctgctgcatttacaaaaaggaaaacagaaaaaaagaagaaactatatcctgttttttttttttttttaactctaaaagtcaggaaatgcaatctctgtaactgtgcttaaacatactcattattttttcataacttgaaggcttgttgtgttggggattttttggctgatatttcagacactacataaaacctaatgagccctcactgcagtattggattgtggtgctgcctctgccagcaagtgtagctgttgagtgagatgcttggggagttggcttggtttatccttcccggctgaccttggaaggtacataatgtcctgtggcatttcttcatgcgctagtccttaaaacaagaattgtttccattgtagaccagtcagcactatctttgaagaagacattgaagaagaaataaatattcttgataacagctctgtggaaatgccagaattttattagacggttttctcttcttggcggcagctggagcaggggtttagattttattcagaaaatggagccctgctccattccccactgtgaactggcctgggcatgcagccttagtgacacagcgcaaacagaaacagcccccagcccctcccggaccctggctgtacaccatgaggtgctgtggtctctggagcctcttccatggtggcgttattaatgaacattactgtgggctctgttctcctttaatttttttttttcttttttttttgagacggagtctcgctctgttgcccaggctggagtgcagtggcacaaccttggctcactgcaagctctgccttccgggttcacgccattctcctgcctcagcctcgcaagtagctgggactacaggcgcccaccaccacacccagctaattttttgtatttttagtagagatggggtttcaccgtgttagccaggatggtctgtctcctgacctcggatctgcccaccttggcctcccaaagtgctgggattacaggcgtgagccaccacgcccggccaaccattctcctttcacttgcacctcagttacctcctctgaacaaagaagggaatgaactcaccccatggtgctgttacgctatttaaatgtgacagtaaggcaccaagcagagggcctggcacaacacaaaggtctcctgtaaatggtagctgctgccgttgtccccagctgtatggtcctgggcagcatgtgtaaatgatttaatattttctttcttctttgcaaaatgggatagggagagtttctctggtgatgaaatgcgatcatagtggcataggaggtagcgcatgcccatcacggtgtagctgctcagagtgctgcctctctcattgctgatccatgtcctgattccttcccagcttcctgacactaaggatgagtataagatagatgctattgtcatccctgttttatagacgaggaaccaggctcacagagcttagatgacttgcccatgattacagagccattaattgatggagcctggaattggaccgaaatttggcaacagagttctctgcctttccagacctgttgattttggtctttcagacgttgctaggagagccctgaagtacttgatcagcccaagtctgtaagagggcataagagcaggtcctggttgtgtttggcccagtctgagagggcctagagttagaaggtagagtgcactttgaggagtttgtgggccagggttagctcatccctccctggggtggggagtgatcagttggcagctgtgccgggagagggagctggtggcctggggcgcggtggttgtgtatgaagctggaggcttgggctcaggggagacctgagcatggggaaggagcatcgtgagcatggtgggagttgtggcactgtggggggggctcatggggaccgtgtccatcctccctccagaatctcctgctgtgtgtcctaactgtggtagtgaccacgtggttctcctcgctgtgtctcggggaacccccaacagggagcggaaacagggagagcagtctctggctccttctccgtctgccagccctgtctgccaccctcctggccatggtgaccaccttgacagggccaagaacagcccacctcaggcaccgagcacccgtgaccatggtagttggagcctcagtccccgtgagtataggcaaaacaagacatagatgagtttggggaagggaaggggcactgatggggaggtggagatggagcccaggggctgccatgggcaggctgatgccccctcattgccctcagcccctgagcgctgtggcctccgctctgtggaccaccgactccggctcttcctggatgttgaggtgttcagcgatgcccaggaggagttccagtgctgcctcaaggtctgtgctccctgacactgcccatgcccccagctgtccagggtgcccactcgtttccatcacagccaactgagtcagatcaagcactctagagacctgatctggcttctggtttcaaccccagcagcttcttgctgtgtggccgtggacacattccctggtatttgagtcccagttgttgcctgtctgcaatggagataacgatgcctcccttacacagtggcgtgcgtcagggctcatgttgaagctgcccagcccagcacctggcactcatcaatggggcctcctagcattattataaacacatgatgtcgttaggcctttgttgagcacctgttgtgctagacattgaggatctacagatcaatcttgcccttgatcttacagtctggtgtgagaagctgacaatgattatgcaatatgcaaatgctgtaatcgggctaaggcccttgaaggggtgtctagtccagcttgagtgggtcaaggaaccttcctgggaggtgatgtctaagctcagtcttgaagggtaagttaaggagtagggaggaaaagaatgtcttaggtaaaggaagccgcaaatgcatggaggcccgagagtgtcgctggtggggagaactgcccaggatgagggcacctggacatgcagggcgaggggcaggggtcctgagaggactctggggggccggcaggggccaggtcaggagctgcctcctgtgtctgccaaggagtttggacttgtttctgagggccactgggagccactgaaggatttgaaatggggcagtgatggtcagttttgtgccttagaatagttagtctggcggagcgtggagggggtgaggcgacaggcagggaagccagctgctgaggctctgagcgggcaggggctgcaaggcagagagcggtggtggatgaagaggctgtcgagtgtgagggaagctccatagactggtgggtgggcagtgggagggtcaggccgagggtgctgtcaccaggaactcggctttcagtctggccccacctccccaggcctctcatcaggtttctcaccaacttcctcttcccccaggtgccagtggcattggcaggccacactggggagttcatgtgccttgtggttgtgtctgaccgcaggctgtacctgttgaaggtgactggggagatgcggtgagtgagaggggagatgcagtgagtaaggggggagatggggtgagttggggggagatgggggagtgagggggaagatggggtgaggggggagatggggtgagtgaggggggagatggggtgttaaggggggagatggggtgagtgaggggggagatggggtgagagaagggggagattgggtgagtgagggggaggtggggtgagtgaggggggaggtggggtgagtgggggggaggtggggtgagtgggggggacgtggggtgagtgaagggggagatggggtgagtggggggcggagatggggtgagtggggggcggagatggggtgagtgaggggggagatggggtgagtgagggggagatggggtgagtgagggaggagatggaatgagggggaagatggggtgtggtgagcgcacgggggtgatgcagtgagtgaggcaggtgcagctggggcagggcctctctgggactctcactccactctcatgcttctccattgctctgtcccctctctccacagtgagcctccagctagctggctgcagctgaccctggctgttcccctgcaggatctgagtggcatagagctgggcctggcaggccagagcctgcggctagagtgggcagctggggcgggccgctgtgtgctgctgccccgagatgccaggcattgccgggccttcctagaggagctccttggtgagagaggggaggggaaggcaggagggtgggcaggagggtgggcagggccttggggccaggctccccacctggtacccagtagcggagacagagaggtaacaggacttgtcccttgtagaagtttctgaaatccagaaatgtggagaataggaagggattgagaggtggtgagtttaggctggaggagagcagagccttctaaagttccctggcctgcctctgtctagatgtcttgcagtctctgccccctgcctggaggaactgtgtcagtgccacagaggaggaggtcaccccccagcaccggctctggtgagtcgataggaggcagaggctggggttgctgcccaatcctctttccacagagccccagacatggccctgtgctgagtaggtcctgggcagccacctgtcctcatgccatgccccttatgggcccctagtgtctcctcccaaccccctgcagggctttcttcccactcccctctcttcaagtccttcccacccgctagctgatcttcctgtgcctgccatattccctctaggccattgctggaaaaagactcatccttggaggctcgccagttcttctaccttcgggcgttcctggttgaaggtgaagcctctgtgcagctgatgcttccctggtctctgtaccctaccttgtcacaggcactggcccacgcgcagcacctgtacagtgcccttgcagcaactgtcagttcctggaacctggagaacctctcacttgagggcatagctgagtaacagcctcagtgtgccctgaccctctgggtggggttaggaggcacccaggatcctcagttacccagagcctttgctctcgggcccaggctttctatgaagtggagcagcgtggctgagtcggccctgcctcatcagtcacagaaggagagggtggagccttgtttctgagtagggtgggtgtggggcagtggggggcggtaggcctcagaggtattccagagtagagattcatggagcttgggaaagggagggtcttggccccaggggcacaggctgctttgtgacccacctcagagtgtggttcacacctcttctccccagcagcactgggacgctggccccagggatctgggcccctccatgaccttccacactggatgcctctttccctgcaggcccttccacctgcctcgtatccctgttgctgactccgtccaccctgttcctgttagatgaggatgctgcagggtccccggcagagccctctcctccagcagcatctggcgaagcctctgagaaggtgcctccctcggggccgggccctgctgtgcgtgtcagggagcagcagccactcagcagcctgagctccgtgctgctctaccgctcagcccctgaggacttgcggctgctcttctacgatgaggtgtgtatgtgtatctccagtgagagggagggaggggagatggtgagcacaggttggggccatgagggcagggtgggaaatgggtctaggaaccctgggcattggtggcaggatggcacttacagatgagagaactagggttggaggaactgggggactctaggcttggatgaatatcaagtcagggaggcagctgtaggcaggggagacacctggactgggagcccagccatttagctgggccacgaggctttcagtgaggtttccggcagctttgagttggcaggattgggccggttgtatgccagccgtttggcctttgtgaccaccacctgaggagatacggttactggtcctatttacaggtgaggaagctgaggcttggggatgttaaccagtttgcccagtccaaagtggtggagccgggaattgaatccacagttccctgaaattgagcccgcatcttctgtacaacagggaagatgaaaaagacaggtcctctggaggctttcagtaaacgtcggctggattctgtttacaaagctcagagtcaggatcttttatggggagtgacatgggcctggggaaggggagaggcactgagccaaggtggagacagtgaggccttcgcagagacctcccttgtacccaccctggtgtggtccccatgagcctcgccttgctaactgctcggtctgccaggtgtcccggctggagagcttttgggcactccgtgtggtgtgtcaggagcagctgacagccctgcttgcctggatccgggaaccatgggaggagctgttttccatcggactccggacagtgatccaagaggcgctggcccttgaccgatgagggtcccacgctgaccttggccctgacctcaggagccacgctgtagacattccctctcctggtctctgggtctggcttccaggctctggctgtggatgtcttcagcctctgggtgctggccagtgaggtcccaaatgacccagggcttaagggagaggcgagagaatgatctggcctcaggggacaggccacctggtcaggaggaatatttttcctgcactttttctcaggtatcaataaagttgtttccaactcataggtcatgtgtggtacttagagtcactcataaggcctgcagttcccctaacctcttctgacagaagctatcccacccatcacctttcctgaatgggcagctccaagcagccttgtttgtgccatgagaccccatctccaacccaactgtggtcccagcatgggagatcaagtagagctcctgacccacaggcacacagccccaagctggcagtgacttgtcatgtggcccggcatggaattgctgccaaacaagtagctgggccagatacggtcctgctctcttgaactttacatggaaagtagtgaggacttcaggccatcgcagagggtgtctggggagagggtgtgtggagttgagtggtgacctctggtgcttcctgccattgccttctcagcaccgcctcactcagcctggaggcctggatggtcagccccactccctcacctcttgtctccaagtctggccccagtgattggttcaggaatcctcatgtgaattcgtttggcttatgaagccccagcgcaggcatttgactagagcaaccaagaaggaggcaagtttcctctcagggttgctgtgaggataagcctggagctgctggctgtggggaggcgctttcctaaagtggaaccatgagagagaggaagatggcccagatggagagagcagggccagactctggggatatctttgaagcccctgggtctagttgtgcccgaagacagaaacccctgtgactttaggtaacatgatctaaaaaagaagccctcccctccctgtttctatggcttaagctaattcgaagcaagtatgagccaccaagagtcccaactaaacaaaccccgactccaacttgagctgggctgagatctgtttcttgtacccaagaatgaacacaatggagatcattacagccacacagttgtgcagagaggctctggttcttggttccgattctgaagtgaggcagaatgattaatccagctcactttttgtgtcaggtctatggccttgaccactttgtgacccgactgcttggtgggaacagcagtactggggctgtgtcactggggccttctacctggaaaggatgtgggaagggttgcctggcctaaccagcccactacatctctaaatccatggggcgaactttttaaaaatgaaaaagggtcattgaaaatcctgtacttttacatttatttaaaattatttaaaatgtatttaaaagaatgtatacaggaaaaaaatgtatactgtacttaagaatgtagagtgagttgctctcatatgcctgaccccctaactctagattcaagcattcttacccaatttttgtgtatctgcttaaaatctcagtgcatgtacacaattttccccagaaaagggtaattaagccattcacttccatttagaaaaaagattggccgggtgcactggctcacgcctgtaatcccaacactttgggaggctgaggcgggcggatcacgaggtcaggagatggagaccttcctggctaacatagtgaaaccctgtctttactaaaaatacaaaaaattagtggtggaggtgggcgcctgtagtcccagctactctggaggctaaggcaggagaatgatgtgaacccgggaggcggagcttgcagtgagccaagatggtgccactgcactccagcctgggcgacagagcaagactccgtctcaaagaaagaaaaaagatgatttctaagattagtttctccctggcaggtctggcctgctttggcgggagagtagggggggaatggtaggagtcatggaaccggctagttgggaaatgctggctggggtagaggcctcttggaaacagctgcagaggctgagggcccagaaagatctgtgcagaggcccagaaaataaattcacctacttctgttttgctcagaactgccctcaatttttaattgaagcaaattaaaacttcccaaaaatattagtccactttcttggcaaggtacacagccccttctcagtcagtgattttggaccatctgcaaacaggagctggtactggtcctgaggaaggcctttccctggccagaggctgcccttcacaccaggcctgtttgcaggcacttccccagaagccgggtcaaatcaggccatggtgcagatggggcagaataatctccagtcattcaaggtgattggtagagaagtgcgaggcagggagttggaagaggagttccttccatttctttgtgcttaccatctctgtgaacaccttgttttctagaacagtgcagtggagtcttctgcagtgtttatgcaaaagtgctctttttttggtgacgcagaagacagaggtcaagtgtgaggtcatcaccactcctggaggtgtctgtccctttagttctgcacctcactaggagcagatgaaccaggtgcacctgcccctctgacccttccgccctctgagcaaaggtgactgctttcccactggtgctcagcacaggtgtcagtaggaggcccttgaccctggacaactcccagagatggattcctccattcagtctggccttttccctccagcaagtgcttattgattgcctggcctctgtttggccttgggcttgctggcatgaaggacgcagacctctggctcctggaaagcagtggagagaagggatcctctcacctgaaactaaatccaagggagaagcaggaaatcagtggtggggaatgaagatgaggatgaggaggaaggggcacagaggtggtattgagggtttttttttttttgtacttagaaaaattaaaaaccctctgtattataaattcaaaaattatatttaaaaatttatataaggccctaggggggttagtgacttaactaagtgatagaaaaatcaatgactaagacttcagaagcagggagcaggccagctcgacagacctgtctctttttctctgtaggaaagggtctgtctttgccacgtggaggcgacatcctccacccttgtcaagatgctgcggtagcttctgaagagaccctacccagattgtttggctgtggttgaaaattcagctatggttctgtgtgttatgttttgcccatcactgagcacatgcattatttcacatctatctattcatctactcaaggggtggtgtggtgtggtggtataggaaaagagatggtggatttagctctaaaacatccagggttatgccttagttttgtggctccatatttaatcacaaaagtgctcacccttgttccctcatctactgcatggggatgagactgatcagtaacttacctagttcacaaaattgttgtgtgtaatcatgtatatggaagtactatgtggtccataaaacatgaaataagtgctggttaaaaacctgcctaggccgggtgcggtggctcacgcctgtaatcccagcactttgggaggctgaggcaggtggattgcctgaggtcaggagctcaagaccagcctggccaacatggtgaaaccctgtctctaccaaaaatacaaaaaattagctgggcatggtgatgggtgcctgtaatcccagctacttgggaggctgaggcagggagaattgcttgaacccgggagacagaggttgcagtgagctgagatcgtgccattgcactccagcatggacaacagagcgagactccgtctcaaaaaacaaagaaacaaacaaaaacctgcctattacttatcacaagctgctttgttgcctggaaatactatttgtaatcaaaagagggaagggccaggcatggtggctcacgcctgtaatcccagcactttgggaggctgaggcgggtgaatcacctgaggtcaggagtttgagaccagcctgaccaagatggtgaaaccccatctctaaaaatacaaaaattagctgggcctggtggcaggtacctgaaatcccagctactcaagaggctgaggcaggagaattgcttgaacccgggaagtgggttgcagtgagctgagatcatgccattgcactccagcctgggcaacagagcaagactccatctcaaaaaaaaaaaaaaaaaaaagcctgcattttattgcccatgtgtttctaaggggatatgtcttcagacgcttctggggaaaggagtgaaccatagcatagttgttgttcttttggcccatctttgtcatttgattgttttggactcagtgacttttccattctccacaaaaacattcttcagtttattagttactataattacttgtgcacttgctttcaattccacagacatttattgagctcttagaacgtgccaggatgtatgtgagaagatgggggcagggatccaaggatgaatcagatgtgctcctgcctccaaggagcttatggtccagggaggaaacggggaaaggtgccctggtggtggtcgcgaaggctgggtaaggttacagtaggagaatactgcgatagtgactgtttctgatcacctgctctaataattttgttcacgttatttcactcagtacgaccaccctgaatgaaaagtgtgatctctatttcacaggtgaggaagctgaggctcaggttaaatacagggaatctcaccaaggggatactagatgtcaaacttgggccatctgtctggaatctgtgctctttcctctcaactgtgttgcctctcaggccttccagagtgcccaccctacttcccccttcagtccctttccttttttttgactggagtctcattctgttgcccaggctggagtgcagtggcacaaccttggctcactgcaacctccgcttctagggttcaagcgattctcctgcctcagcctcccgagtagctggtattacaggcatgtgccaccaggcccagctaatttttgtatttttagtagagatggggttttgccatgttggtcaggctggtcttgaactcctgacctcaggtgatccacctgccttggcctcccaaagtggtgggattataggcgtgagccaccatgcctgaccttcagttcttttctatgcatctccttgtggcaccaacttccagggaaaccacattcttccagaaaaacacaaaccagatcatctaaatatccaggcagactgttctttcctgccatagggcctttccaggctcttccttctgcctagaatgttcttctctccccacttctccaactcacccttcatggcatggccagttctttcgttcccttcaggtttttcctccttgtcaccttcttacagaggatgaccctaatcctacttcctgaatgttcactgtaactgtcctttcccttcatggcctttgccatgttttttaattataagttgtgtttgcttgtttgttgtctttaaggtacccaagaacagggaccaggattttttcaccaatatatacgcaacctggcatggagttctgagtgagtgtgtgagcttcagtttacacactgggtgcgtgaaatgttacttcataacactggcaaaacagcctgattttatttcaagcccccatcccacagggttagcaggactcactgacttcactttctcccctctctgcatcttggggaccctcctgctttgctgatggggaaggtcaaagggtctgctcctccactccttccccatcttccagccaagacactgtctctcttgctaaccctcttcctctttcttccttcacaaacctcccttggttccctaaagcattgtctctggaagaacaaaaggcagaagggctcgtaggcgatttctgctttctgtcctacccattcgccccaaataacaaaactcgaagcaggttacctgcttgggtaggggcagaagaggagcatgcaaggacatagatctgtatctcaaaattctatgttagccaaatacatcagtaaagacgggagctggaaggtggattctgcaggggtgggagaaacttcagggacattggtgctgtcctgagattggatttatttcaaagttgagtccaaatttaccaagcaacccatgaattatgatgggataaaccaccgcagagtaacaacgatagtaaataataagaatgtcatttattgagcacctattttgtgccaagcattcaactggcattttacatatagcatctctaactccagagtctgagctctttctcaatgccatgttatctcttgtgtaaaaataagatcttactcaccaccaggccagtcagcagcaaatggcactgggtgctctgctgtggggagtggggagatacttttggcaagagtctaagtgaaactggggctagctcaacccataccctgctctattccagaaactctccagcctgccaagttaggttttccaaggcaaagattggtccatgaccaaagagtgtcacaatctaccctggtggggataaaagtcattctggatgtccccaccttcttagagtttgcaattgtcatatttaatatggctcttagaattattgctctggtaaggacaagcttttgcttattttacgtgtgtacatttcaccattttttcacagtgcaagttatttgaggactttttggtatttttgtctcttagatttgtagtagtattgaaactagctaacagtgttgagcacttactataggccagtcacccttttatacaaatgaactcatttcatcctctcaacaaccctgttattattgccattttacagataggcaatctgagacccagagagggcaaataacttgatcaaagtcacacaactgtcaagtggcagaactgtgctatgaactcaggcggcttggctctagaggtctcacatttaactattcccctatacagacgctagtcacaaagatgcagtctccttgaaaagtcgatctgggaagttagtggtctatttcagtttgtgcccatggcatggaaggtctaacagttgtgggagggcatcaagacatggtgggggaggctgggcatggtggctcatgcctgtaatcacagcactctgagaggtcgaaatgggtggatcacttgaggtcaggagctcgagaccagcctggccaacatggtgaaaccccatctctactaaaattgcaaaaattatctgggtgtggtgcccgtctatagtcccagatacttgggaggctgaagcaggagaatcgcttgagcccgggaggcagaggttgcagtgagccaagattgtgccattgcactccagcctgggtgacagagcgagactctgtctcaaaaaaaaaaaaaaaaaaaaaaaagacatggtgcggggaggtactgtggtatgtgatatatgaggataaatataggacataaagccagaagcccttgcatctgcttctggccatgttgcctatgagccttagaccttgggcaagccaattaaacttaccaagcctcatttttctcacttgtcaaatggggttaagatgctctaccacagagggttgttgtgaggaaccaatgagaatatgaatattaaagtggcttgtaagctggaaagcactacctgcatttaaaataatgaagttatcattgttgttatccttaagagcactggatggagatgatggcgaatgacacagtaatcataagacaggcaggggctacccaggcctgttaacaggagggccattccctcacatcctctctgccagctccttgatgttggcatcactaatgtctggtgcctgctcatcccatgacctagacttagagcccattcccctgattctagcagtcaggatgactagttggaaataacagccactttaagctggaagggaatttactaaaaaataatgaggattagagggtattctcgggaggaatagagagcaaggacttaatgaccagctataacatgagaacttctctgccttccatgcctgcagaagtctgagtctcctgtgcacaatgctcacttctaaattcaggtcttgcacaggtgagtctgactggtggaaccgaggtcagtatctgtgccctggctgcaatggttttctggcttctatcttggcaagagaagacttatgagaaatgaccaaaatgtaaaagtgggttttcaaagatctgggtggccacagatgacagatatctgccatactggtctagttcccagcacgctggacccgcagagtgatttcagggaacagaatcagaggaatccacccgagggcttctggcccattcatggggagcccagagaacggtgtgctttgcctccaaatctgggtggtgtggcgggatggctcctgctccttcggacctaagggacaggctgtggtgctgctgcatgtgcagacaagtgtcctatgctgccagcatgcagggtggggacattcctgtgagactggactgtgaggaagggtgtgacagttggctactgctctaagctggcctgtcgctggcttcagcctttgctgtcacctttcctgtcaccatttcagtgtctacaggctgtaagctagaagctgacacatacccagagtggccatcctttgtgcatgcaaggagtgctcttttgtcacagaaatgaagaccccatcgggaacacactgtaggggactgacaattacaggtgcgccgcaggcaggatgtcaaagacgagagcgggcctaatgaaagcatgcgtttatgtctaataggatgagttggtgggtgtcagcatcatcttactccccccagcctggaaagaaagagataaacatgggtgtctaaaggctcttcaaggggagattttactccatcatctcagaggggtggaggagagaggaaggtctgtaagggtagagaacgaagcctcagactctgggtggggtgcgggtctccaactgaaagaatgggggtctggggctaccaaaagttgagggcctgtgctcagcatcctctctggggtggatggaacctcagagggacaagtcctgtgacacccttatggcatcttggtgtgcaggatgtacatggcctggtacaccaggggtccctggttggcaagacccttctcaggctgtctcagtattaaagtaactgctgtctgactttacagactagaggagcggggctgggaacacaatgtcgaggtggattgaagaccagagcccctgtgcaatgccgaccaggaaaggttccaaggctcttgagtgtctctaaggacgtgaaggccctaccaaaacaaaattcaaggtagggacttggaaccacattgcctggctcagaggaataaagaattgggatagctctggtttgctagggctactgtaacacagtatcataaacccagtggcttaaacaatggaaatctactgtcttacagatctggaggctagaagccagacatcgaggtgtctgcagggctaggctctctctgaagggactagggaaggatctgttccaggcctctctcctagctttggtagttccttggcttgtggcagcataactccagtcttcacaaagcgttctctgaatgcacgtctctttgtccaaatttcccccatatatatatatacatatattttttttttttgagatggagtcttgctctgtcacccaggctggagtgcactggcacgatccctgctcactgcaacctctgcctcctgggttcaagcaattctcctgcctcagcctcctgagtagctgggattacaggcgtgtgccaccacgcccagctaattcttagtagagacagggttttaccatgttggccaggctggtctcgaactcctgatctcacgtgatccacccgccttggcctcccaaagtgctgggattacaggtgtgagccaccgcacctggccaatttccccttttcactggaacaccagtcataatggatgagtccacccttatcttaacatctgcaagaacgttattgccaaataagggcacactctgatgtaccaggggttaggacttcaacgtataaattttgggggacactactcaactcccaacagctgggtctcccattctgagttttggggcacagctgtgctctgcctaggca

SEQ ID NO: 391 - DNA, 73358 bp, Homo sapiens
agattgctagttttatagtgcttttttgatttggaggttactatagtagcagcagagtattattaagtgtgtatttctcaccacataaataaaagtttttgttcaagtatttgaaatgccagtaatattggattgtgactactttatggcataaaatagtttttctatgaataaaggctcacataggcttaagacttcaaaaaagtgaagatttgaaaacaaagctacagaaattaaaattgtgttgtatggttataaatattaaccttcataccaatggcactgaagagacaaggcagaaataggattcagtatatactagaattagtagaggatgaaggtagtattctaagttactgaatcaaagtgtccaataaattacagaatacaaaataaatatttttaaaaacaaaagatttcctatataacaaaattttctagaaagaaaactatctggctgggcgcggtgactcatgcttgtaatcccagcagtttaggaggccacggtgggtagatcacctgagcccaggagttcgagaccagcctgggcaacatggcaaaacctcatctctacaaaaattagccgggcatggtggtccggtgcctgtagtcccagctatttgggaggctgaggtgggaggatcacttgagcctgggaggcagagattgcagtgagcagagattgtgccattgcactccagcctgggcaacagagtgagaccctgtttgaaaaaaaaaaaagaattttcaaaatttttaaggttaactacacttacaaagactaatcttcaaaggctttggcattttaataaaaaatgttatacagcaccatgtttttaaatggttaaaattggttccctacgcatttaaacagatgccaaagtacacattcaaacattacaatatttatttaaaatataactgtcaattttgcacttagtataaaagtatagtatgtattgaacttcattcaactattcattcaacaaacgtctataaaatgattattgtcatgtgccatttgctgaatgaatacattaaagtctacttggagaatcagatattacaatgtagcacaatgttttatttttttatttttatttatttatttatttatttcagatggagtcttgctctgttgcctgggctggaatgcagcggcatgatctcagctcactgcaacctctacctccagggttcaagagatgctcctgcctcagcctcctgagtagctaggactacaggcgtgtgccaccaaacccggctaatttttatgctttttgtggagatagggttttgccatattggccaggctggtctcgaactcctgagctcaagtgatctgcctgcctcagcctcccaaagtgctgggattacgcccaaagatgtgagccaccgctcctggcctagttttataataagagtattaatgatatcttgcagacaggcccttggggcatccgtaaggttcacagtagagtgggaatttggcctgaatctatctacaccaataagaaaaaaaggcatgtggagaggagataaggacactgcagatgttagacagcatatgggaagacactatatgaagttcagatggagtagggagaagtcaagtgtggttagaagtgtacagttggttgagggtgcaggattttgactaaacatgagttcaaattctggttgcgctactcactagctggaggactttttgcaagtaactaaacctaagttgctgtcctttcatctgtaaaatggggatagtaataatacctagcttgcagagttaataggaagatttaagagcacgtgtggaacctagtattgtgtctaacctacccagactaagagctaaataaatgggccagacaaggtggtttcttcctgtaatcccagcactttgggaggctgaggcgggtggatcacctgaggtcaggagttcgaagccagcatggccaacatggtgaaacctcgtctctactaaaaatacaaaaattaaccgggcgtggtggcaggtgcctgtaatcccagctatttgggaggctgagacagaagaatagcttgaacctcggaggtagaggttgcagtgagctgagatcacgccattgcactccagactggacaacagagcaagactgtctcaaaataaataaataaaaattaaaataaataaataaataaatggtacccatttttatattatttattactacttcatgtaagtaatatcaaaaaacatttggctacatatttctgagaatttttcattccatggccttaaaattattttagtttttaaatttaatttattatttattattattttttggagacagagtcttactatgttgctgagactggcctcaaattcctgggctcaagcaatcctcccacctcagcctcccaaatatctgggactacaggcacgcacctggccattctatggctttttaaatgacaagtgagtgttaattgccaacctcttttagatgttctctaaaagaaaatgatatttattcaggaataggacattgcaatgggaatatgtgtgccatagtaaactatatgcatattaagggaggtaaaggaagataaaggttttaaaaggaaaaataaagaggattacagaattgttttgaagtgattctccttcaaaggatcataacaaggatctgtaacaagcgtggcatcagtcaaggttggctggcagatgtcctcacagaagtattttttgtgtaaggttgtgatgatctttgtgcaatgttgtgctttttgtagtcttttgtgatagtttttgttacaaagcactcacgcaggagaaccctctcttcatagccttcctcagttctatttgtcaggattttgttttttttttttttttttttgagacggagtctcgctctgtcacccacgctggagtgcagtggtgtgatctcggctcactgcaagctctgcctcccgggttcaagccattctcctgcctcagcctcccgagtagctgggactacagccgccctccaccacacctggctaattttttttgcatttttagtagagacggggtttcaccttgttagccaggatggtctcgatctcctgacctcgtgatccacccgcctcggcctcccaaagtgctgggattacaggcgtgagccaccgcgcctggccgattttgttcgtttttaacacaaatgacaccattttgattctgaggactttcatgtaataatgagttcactttttcatatggagcccaagagtataaaagtgtcacttcttcctgaccaaaaatacggtaaacgagttacttcagactacattcactttagggaataatctctaccccagaatcagtggtttatgtaactgcctgttatagaacttgataatcttaaaaagctttacagagagcatctattacatggtaaaatgtccaaaaagtagaaaatttctatgaattcaagcatatgcatgtggctttgcaagtattttaaaatcatttgcatgagtaattgtcccttgaaagaataagctgcattcgcatgtctctttctttaggtctgtttctgtctcagcctattgcactcaggtttctgttcctattcactcttgactccctgaaatgactctgacaaatattgcaaatagatacctaatggccaatggccaaatcagtgactttttttaagcttttcatttccatgaattctcagaagtgaacatggttgaactgcctcttctttttgaaattctgtctgtactttggcttcatgatgccacacccacttggttttcctcttacatctctggccactctttctcagtagattttatttttcctcttttcattacctgcccctcaatgttgggaatctgcagggtttctgtctttggctctcttctcattctacaaattctctgtgggatgatttcatcctctttattgctttccatgagcagatgtataataatatgagtctcaaatttaatctccatccctgaccttgctccattgtttctgactggcttctaactctagttactaacagaatatctccatctggctgtcccagagacacttaaaatcattatatcccaaaatgaatttaatctctgtttttttccaaccttttctgtctccttcactctcatcttggtgactggctcccctatccatacatgcacaacccagagagctgggagttatcctggcttcttttctttccttagccaaatgccctccccatattcagtcggtgtccaagtactgttgattctatttcttgaacatgttttggcctcttctgtccatccccattactcccagcaactcacatcatgactattgcaatagtatcctaaccagtctccttgccttcacttttagtcaatcaagttgtttcgtttcactggtaaaacttctctggtggcttttcactgattatgggctaaaacccaaacttccctgcatggtgttccatattcttgatgatctggcttcagtgaatctttgtgtcttcttttttttccacccctccttttctgtccacaggattgcatgctgttgggaaacttttcctcagcggctgactgcagagctgtttatgaaccccacacacaggtagaatcactcagtcctgtgcctacgtccataaccgcattctctcacaggtttccatcatagctcctatcaccctttatttaacgtatttgtttatatgcacatttcaccctatttctctggcatctcatagtatttaaaagaatttttggcataaatatcggtatcaatagatatacatcaagcactttcttaaggaattcctcaagaaacttcctccaagaacttcctcaaggaactgggaaaatgagaacaacttcctatctctttggtaattcctcaaactgttctatctctagcatgtaataaacattgtcttgctgtggggtaattaaggaatcagagagatcgaggggttaaggaggaattatttaattatttaggtgcaccgacccagtcggattaacatcaaaaggactgagcctcgaacagagagtcaagctaccttttaagcattttttggggcagggggagatctatgcagggggaagcatgttacagaagcgagaaacaaagacagttattcaattaagacatgcattacattatttcttacttttcaaggaacaacatgttttacgacttgacattatctgtctagtgaccttgcagctgcacagctagagaaacagagtcttcacaatgcctgggaaagggagagataaggtccactagccacagaaaaacaggcagttaattttaaaggactccagctctttctcttcttcagggggaattgagttttcttacatacaactgagtttttgcttacacattctttaatttcttttaattcctatttcagtctgactgaaattagaggagctacctggctgcatacattactgattccccgccaacgtgtttctatgttctttgaaagacaatgtaattgtgccttacttgaagtaaattgatgtgatctccacagtcatcccataaaatattcactatcattatcactatcattataatctggctcaaaggccagattaagatggtcaaataaattagtttgttaaaccaatttaaaacacacagtcttagctttgtacagtggaaatatggtagccaatgaggtttatcctaggttattgctaattgaaaactttttccaataccctgccatgacaacttgcaagatagtcagcactggcaatttttgacagtcactatggagactgaattgttttagaaaaaagtgggaagcaaggggaaagagattcagtaggtgaacacatttagatcatgcaggtgaaaggaccacactactgtgggtcactcaatgttcacatgttctgcctctctctctgcctcatctgccttctccaaagatggcatggttacaagaaccagagtgtaggtaagaatgttcagagatggaaagttcatggtgccagtctatgtttgctctatcaaaaagactgaggttgctgagtgctgtggctcacacctgtaattccaacactttggaagattgaagcacgcagagtacttgagtccaggagttcaagaacagcctgggcaacatggcgagaccacgtctctacaaaaaatttaaaaaaaaattagctgggcatgatggtgcgtgcttgtagtcccaactacccgggaggatgaggtgggaggatcacctgagacctgaaggttgaggctgcagtgagcaggcaatgagtcatgattgtgccactgcactccagcctggacgacagagcaagatcctgtccccaaacaataaaaataataaaaagatagaggtaagtatgagctacacctatagctcagcaatgacctgatgagcagcagtatacattttaagcacaaaacaagtgggttagaatggatgataccaatgggtggtcaatttgaggcaacaagactgatccatgctttatgaatatttaaggtttattttgctttccatctctgtttacaagtaacactcttgtttgttttgtccttttaacgtatgtctaagaagtaaatatctattctatgtttaacatgtttcatgggttaatgatttacttattatctgtacttaacatatgaactgatgtaacatatacttacagataagtttcatctatcccatttgtttttcctattctttagggcagaattgaaaattcttaaataatacagcaaatgcatgttacattatggataaaaaatctgaggcacaggccagtaagtcccttccacaaagtccccacaactttgccaagggcatgaaaaagtcaggtttcaaatacaaaacatctggccccagagcccaatttttttttttttttttttttagtgacagggtcttgctctgctgccaggctggagtgcaatggcatgctcatggctcactgcagccttgacttcctgggctcaaggctcaagtggtcctccttgcctttggcctcccaaagtgctgagattataggcctgagccaccatgcccggcctcagaccccacttcttaatcatcatcctaaactgattcctaatttgcctgagaaaacacggctgctaaatctaaccttaagtccagtgctcttcgtgctaattactctttgtgtataagtactctccggccaggagatctgtcttgttgatctctgcattcttaccaccaagcacagagcccgggcaaatacttgttgaccaagaaaatatctcattttatgccttttgtttttcttttgggttaaatgtgcagaataattccaatttaacatttaagaaaatttaaactttggcatttaaagttaaattaccttaggtatttgatttaagactgattaacctaaagaaatatctagttgctacagagtaaaagataaggatctatgaactgagatctagcatcgattgtgaaactaacccttttaaagggcttgtttctctgtgcttcactttctctaggaggaaaatggtcctagtaactcttatctattcccttcaccaggaattgttacattgtctattcttcctattactagcatatctttaaaaaaatggtttctgctttatcagttagatattattaaaaaatgtaagtctgtctataaattcataaaatcaatgaaccataaacatatttacatgatattaaaaataacatatttttatatccttttaaagacacattttatgctacatttggacatgtttaacatcctgtaatttactaaatatcctacaattttcctcattcatttgacttttgtgagaggaaaaaaacagccttctgaaagaagttaacacacattatatgctactaaaatattttaatgcctcatttgttccacatttatttatatgtttattggcatgtttatttccccacttatgtaaatagtgtttctctgtaggaagttggcaataatctcaatagatacatgactagaactcaatgtagtgggtgattaatcctggctacccatcagaatcacctgagacacttaaaaaaacaaaaccgatgccccagtcctacctcaaacaatttaagtcaatatttctagggctggaattgggacatctctatttttaagaacttctcagatattctacaaaatacttgaccagcacttttcaacactgtcaaggtcatcataaacaaggaatgtctaaaaaactgccacagtgtcagaggaggtgaaggagacatgataaccgaatgttatgtggtaccctaagtgagatcctggaatagagaaataacattaagggaaaactactgaaatccaaataaactgtggagtttatttaatagtaatgtaccattgttgattccttagttgtaacaaatgtatcatcttacactaaaacaaatgtcaacatctcacacaatagagaaactgggtatatgggaactgtctactatttttgtgacttttctgtaaatcgaaaactattctttaaaaaagtttatttagaacatctgactatatgctagagagtaaaagataaggatctatgaactgagatctagcatcatttgtgaaactgacccttttaaagggtttctctgtgcttcactttctctagtagggttgaaaatcacttacatagtaatctgcttacagtgtaccagaaaacaaaaagacgctgtgaaatattgagcccaattgtcaattgtcggcatgtgcgttcttaaaaatttgacactcagaaaccatgggctgcttcattaggacctttagggagattacatttctaccggcagttccaggagaacacaaatagactaatgacaatacacttaactgtaacaatgacaatcctgataattactgacttccaaaatacaacaattcaagaaagactgcttagtagagaataaaaggtaacaataaatttcttagtttagaagcataagtttcattttaatacctatgaaaaatataaatatgtggattaaatagaatgtctaatgttttctcagaccccagtggtttgagaaaagcctacctggatttagccggtcacacctctcttttcataaccattgcaattttaagcatatttgtcatctgtgcaaatttctagagaaaagtcagaattgtgtttgaagaaatcactctgcacaagtaaacccttgccaaacagcaagtgccaggagacgatgtttcacaaagcttttaaaaattattattattattattattattattattttgcacacattatctagtttggtaaaactgtcaccaatttacaatccggaatcaccatgtgagtcgaattaacaaatgtattagcaacttgtagtcaaccagattgcagttccagctccctaactcaatgcaattttaataatttctcttctctgagtctatctcagtttctcatctgtaaaatgagtaaaagcaaaccacttgcagttcagatgttgagattcggtgggaaggacctcgagaaacagcggacaatttcaggatttaggactttaggtcttgatgggtggatggtactgtggaagctgtttacttgtttgtatttctagaatcggaaggtaaagcgaaagggatggaaacgagcgaatggaagaagtaggacagacaccagacagagatcaactccagggactcttccggacctgcagggcaggcagagcattcggttgctaggcagctgcgcctcctgggagggtgggggaccccaggggcaggtgtctaactcactacctttttgtttagccgcggtgccttcttttcaaaatcaatgaaacctgtagcctttaaaagtagacatctttttccaaccaagtttaggcaagccctgtagccgagttctgcttgcggttgtttttctttttcctgttctcaggcgcgctgcgggcacctctcggacaaggccccagccgtcgcgggttgccgggcagagtcggacgccgccagctcttcactccacgcccacctctctcctggagcgctgggccttcgctggccgcaccggcagccatgagctcggagatggagccgctgctcctggcctggagctattttaggcgcaggaagttccagctctgcgccgatctatgcacgcagatgctggagaagtccccttatgaccaggtaccggccagctcccgtcagcctgtgcatcctgacgctgaggctgcggggtctggggcatatcccagccccgggttgggaggccggggaggaaggcccgaggcggggctgaccgttcggccctcggaggcgcccggagcgagaccttgtggagctgtgactagcgggtccgctgtccgccacgtccacggggatagcaagttctgtgccatgaccgccccctcctcacaattttcagcctcccctcccctatacgtgtcccagaatgagagccctgaactttacttgacgaggaactttgataattcgtttatacttgcatattgatgggctttaagctctcagcgtgtgcgttgttaatttctaaaaaatatgcataaacaaagatctgtgactctccacctcctgttaacatagctgccttcttccttttggatcgaacatgtgatcctcccacctcatctttagactgttgtccaagagtgaaggaggccatgagtttagcttgaggcaaatatgcaaattagaagaatgagaatctaggagggagaaagatacattcattatttaaaaaattacctaggcaagggaagctctaattgtaggagggagaaatgggaaagaaaggctccttacaagaaggaatgatggcattgatgaaaagagaacttaaactagagtaatgtgtatagcgagtggaaaaggtagtatacaatgtacgtgagcggtacaattctggtgggcaggtggctcctggaataggcaaaaaaggagaaaatgggagaacagaagtagcgctgcggcagtttgtcagtgcttttagtaagtgcggaatatacctacgtagttctagttccctagcttttcctctagtggtgttgccttggagatgttagaaaaaatggaaaattgaagggagttacaaaagcggaggcctgagtgtgaatgctgttactaggctctgccttagctcccagcaaatggatgatggatgataacctgctgagatgaacattttgtctttcagatagtacatctctcttagaacagcctacgttagtggtaatacaaagctaggttctgttgttagttcacattaattaataggactatatttctgtagacaagcatttttccaaggtttttttaaattttttttatttttttttatttttttttgagacggagtctcgctctgtcgcccaggctggagtgcagtggcacggcgcgatctcggctgtctgcaacctccgcctcccaggttcaagcgattctcctgcctcagactaccgagtagctgggactacagttacgtgccaccaagcctggctaatttttttgtatttttagtagagacgggatttcaccgtgttagccagggtggtctcgaactcctgacctcgtgatccgtctgcctcggcctcccaaagtgttgggattacaggcatgagccaccgcgcccagcccccaaatgtgtttttggcatagtaatcttatagatattgcttaaaaaaatacacaatcaaatatgtttgggacttgtgacaaaatattgaccctttacgttggtacaacagaagcttgttaagaacctttgatgtggccgggcacggtggcttatgcctgtaaacccagcgctttgggaggccgaggcgggcggatcacgaggtcaggagattgagaccatcctggctaacacggtgaaaccccctctctactaaaaatagaaaaaattagccgggcgtgttggcgggcgcctgtagtcccagttactcgggaggccgaggtaggagaatggcgtgaacccggaaggcggagcttgcagtgagcggagatcgcaccactgcactccacactccacagcctgggcgacagagagactctgtctcaaaaaaagaacctttgatgtgccagacattgttctaggcacaatggtttgcaggaactttatgtgccattttaatttttccattgagttacggtagttttcattctgtgttccacgaaacagtagtcccaagagctgttcagtgagaacaagttccctcattaagtacatttgggaaatgtatgttccttcttggagattcaggatgcaccctaaaggctctgagtagttttgaagaaaaggaaactaattttgcctatttttgattaatccaaataattaaatagttctgaaacttatttgaccaccggattcctttttttttttgacccagggaaagggtcagatatcttcactgttatcctgggaagatgttggtacatcgggaaatgtaggcaaagcagcaatatttttattaatagttaagaccctctaatcttgagttcatagtgacattcagtattgcacctataaattgagatatcaggacttgatatatattcatctcaatgacctttcattgagtgcttactacagattgtgtatcccttatccgaaaagcttgtgaccagacctgaatagaagtttcaaaaaaagttattgttttatttttatgagcaagggttgatatgttcagctccaatatatatagagtaggtctaagagaatcagtaccagatctggaggaaatttgatattcttttcctttctaataatttttatttgttttatttgtttgttttgttttgttgaggtagtttattatggttgaactgtatgtattgccagaataatgagtagcattttaccaggaatagacgtttaacttgatgtcatcttaccagagttaggttttgttactaggtagggctattgaaaagtttacagggcttactcatgttagtcattctttgacctaactttgaacactgtgctgttattactctatgtttttcgtaacaccagtttctgtattttgcacccagttgttatttcatgttggaaatatttcccagaatgatttttcccaagcttgaagaaatcctgcctttttcttcattaaaaaaattaatatttatgttagagtgttgatgcaattaaagaagagctttaggaaggaagcttaaggaagttcctttgattacaagcttgaaaattatctttccttagaacatgactccacaatagcaggtttgtgtggtatcccaagcacctgatgcagagtcaggcacacaggggcttttgatatgtatttgctgaatgagtgcgtcgatcatgttcatgtgtgtgttttgatggagttgttcatatttgtcagcttcctctctatgaaggtcgtcgtagttgcttgatgatctttgtcttcccctgccccatccttaattctcagcaccatatgttcttaaatgtacacttactttttcaaataaatataatttcattatgggcattcttaattcttgttttgagggtcagtttttaaaaatcaatttttaaaatgcttcctaggttcctccaggagagtgtttctaatagtaatgatcatcattgctatctcttacagtgctttctttgtttcggtggaggaagttaaatgatggagagattcacaatctatgaaaagctaacagaaatgtgaccagagcgtgagcagatggtcctctgctccgcagttagctggttcaccttcatgcccctttagcctcatgggcatttactgaggttttgacatttgagagtacttttcctctataactatttgaattactgttctgtgccaccaaactgattatagtatggagtgaatttgaaactcctggacacatagaggagcccagaaattaaaatatttcttcttagtgccaaatggattcatttttgctcttacgttttcccctccccattacaaaagatagtttttgtttttaataatgtcatttttcacttttggttttgcttatttttctcccagatgagaaaaacctctcaaaaatgatttgttatttgttaatctttttataagctggtccagggagcttcaaaaagataacattttggtcctgatacattagcttattgagatgaaggccacctctaagactatttatatgcatttatttcgcctttaagggatactattttggtgtagaatcatcaaaagtctttaattattgccttgtattttctattaggatttctggattttatttttgatagtcaggctagccagagaggtatgatgtactatgcaacagcatgtttcttcagagtaatacattttaatttggctacaaaagaactgaagggtagattaaatataataatatggtgtttggtaatggggaagggttcttgaagaatatgggttctcaactgctttttctagacacagaatggtgagggacagaggccagccggggtctgtaagcatgaagagtattaaagttcagatctgttaagaataaagaaagaaagataactgattaatttattataatttcccttttttgattaaatataataggaataaccaattcatagagaagcattatctttttcaaagtgttctttaaatcgtgactgaaaaagtggttaaaagttgtaagatataaaaagaggaaatgcaaaacagtcctctccgtacagcactgtgacctagagagaatgtttgcttctgcagctcatgttgatcatcctgatcagttgcttaatctgtttactgttctttgtgttccatatgtcagattcatggctttaaaaccagtcctgatttttagctccattataattaaacagttaataaaacgtaaaggtttttcaggcagtgggatttttaaaagacaatatgctttcattaatggggtaggtgtctggtagattttcagattattaaaatcggtgattctgagggtgggacccattagctgtgtatcagaatgggagaaagacttttttctaacttacattctcgttttgccccaatctctgcttataatgagagatgttacagagaggagggggttattattgtaaatggtttgaaggaggagaaatggctgaaaatgactggcttagatgaaagacatgaaaccagggctccccaatgagctgtatgttagtagttggttgagacagtgatttggtgatccaagccaaagaacatatcgtgtgattatctaattggtttcctctttggggccatggagacttagccagacttaatcctttgattctatacgctgtggggcaggtcattttatgaatttgtattcctgctgaattacacagattacactcccacttggctgcgtggtcactagatctctctaaccttctgaaatccatcaattcctctattctcttaaactttttcccccttcttttattactaaattttgaacaatgactcggcagtttaagctgaggagactcattagccagcataagtagtggtggtaattagaaagttgcattcagaattatctggagatttaattccctaaagtaacagaaacaagctaagaaaatgctgaaccctagggtggaaggaaggaagcaaacagatgtgacttgaagttgatgctaatgggtattttctggttctaggaagtggcactctactttccatgtcctgttacccactttgagggagattcagaggaagttttaatttgatcttccatcactgggagtcagttctgagttctgaaagggggagtaatagatggtttggtgcttctgttaagcttatacttgaataagtatgataatatatgtgaaagaactctaaaagttgtgaagttttcttaaaaatgcaaggttttattattagtccttaagattctcctatgaagtaggtactattgctttaatttgagaaggtaatgtagattatatgacttgttcaaggtcatgcagctaagtggctccctgaggatcaagcctagcccacgtcttctgactctagggcaaagcctggagctttctgctcaactgcgctgatacctgtagaaatagtttgctagactaagtgaagctgcacgggtggattaatttaaatcacagaactacaactgagagcgacccaaagaggaaaggctcagtgatttttaaaaaagagttttcccctatctcctaattaaaacattccgactcttccttcatagtcctgctcctgatggatctccacagagccatgcctgtccttggtctctccacatcctacggtagtctgtgttccatccttgctgtcatcccacatactcagcagagtcctgctctgggcccagagtgtctaggttcaaatactgcctctatacctttgaggtaagagaccaacaggacttgttttctggtcacaacacggctgaccaaaataggatctagtctagacaggttaaagtgaagaaaccagcagatggcaaggaaagcgacccctcgctgccctcactgctcatcagtagaacacccctcccaccagctgccatgacagtttaaaagtgccatggcaatgacccagaagttaccacctctttccatgacaacaacctataagttactgcccctttcctagaaagttctaaataacttgttccctaatttgcattggcccaccccttaatttgcatgtaattgaaagtgggttttcatgagtataaatacagttgccaagagcccatagttgctgattctggctacactgcctatgagttagccctcctctgcaaggagcagtaccagccaataaaggattgctgtctaataccactgactcaccctggaattatttccttggcagagccaagaaccctcctgggctaagccccaattttggggctcacaggtcctgtaacatcttgctctgagtgttctcatctgtaaatggtgatgatagtatacctataactcagagggtgttataaggctcatgaacatgtggtaagtgataaaaaatgttagctgctgttgtctgtatacctacagatatttgcatgcaggattctatcatctatatttttcttaaaggattgctgggaatctgaaaagcatttttgaggaagatgtccagtgaaatggatggtgaaaggatgttgaatatagttcataaatcattggcactcaataatttccagaataatctcccccttctctgactctcttatcttccatgtcttctgcttttcttttgttcacctaagtcatctataatttgaccacaatgtgagtatagtatttgacacattgtattgtaatttaggtgcctccccctctagaatgttgtggaattaatgtgttcttggcctcatacccacttaggcctggtctccattttccttcaatgcaatccctcacctgtctctgcacctccctactcattaggcctctcattttctcttctgacctgcacattgatgatttcctgtaatttccctacacactcttcatccacatgatcagccctaaatgtatccctgaagggcagaggaacaagacagagagatcgcggagactttcctcagtgagcagaaatcctctgaggctgagctggtggtttcattttgtgtcactggaggaatctacctgcccttggcaaatcacagcatccagtatcagtggcttctgtctcctttagctgttttttccttttcaagcattgtctacaatcacctctagtaaactttctccctcagttttctataatatattggatttatcttgtatctctcctaaactttacctttcattcctgccttactatgtccaactctcttttttttttaatctccaagaggcactggcaagaaggagcatttgattccctcaaccgtttgtgtgaccttaaacaaattacttaacatctctgaatttgtttccttatctgtaaagtagataatacttacctgctttcctcagatggttgttatgagactcaaatgagataatgggctatagagatatgtatacaagtaaacagaagaaagaaagaatagaatgtgttacttctttcatctggcatgtcattccctggattggtgtgtttccttaagtttggactgtatttaggaaatctatactttttctacatccttggtaggtgcactggagttgaaaacctccaattgctatgtgttctctagttgctgttttgtgttcggttcagttgattgccacatcttctgtaacttccatcctttggggccctcattttctagcctaacttaaccttttcctctcatgttcctaccatgcgtcatgttaaataaattacctgtccttgcatggtgaccatatggtttgcacattgcttgtaccaagaatatattcttaaaaaatatttgaggtgttctttttggatttagagctgtagaaagcaaggatcttttttcctttttctgtttcttagtactttccccagtaaaacagattgagtgctcaacagacattgctgactagacagacatgtaagtgtagatgttttataaataaatttgttataagtctgatttttttaaccagtgggtttctatttaatttgtacagaaaaacccagatgctgagtttatctgaagggtttgtgttatgtggattttccttcttctccttaagtgattaaagtctgaatgttttaaccaccgtgaacttatttttgaataaaaggaaatatttccttggtatagttatgggattattctcaatttctgatatattgtgtgttcattaaacaagtagttatcatctctttgcactttgaatgaggttagattaattagaattttctgatcattgaaaatttagcattcttcaatgtatattcattttacacaactcttgagaacacttctgtaggaagactaaagttaattttttggattcttattgaatgagttagagttcacctacaaatacttggttggtccttaggactttttattttagaaactgtatttcttaaaactgtttactgccttcttaatgctttccaggaaccagatcctgaattgccagtgcatcaggtaaagaaaggtttagctgcaacctttagtttagagaattctttaatgctattgcttagttgttgctatagattagaaaatttgctgcatatcttcctgtgggtttataaaattagccatatctgtcagacattctgtgccttcttatgtaaataaatgattatattttcaatacttttgtgtatattgatagccttgtagaactaataatgcagtctactcattgggacttggagcttaaatggaaatgaccaagatggattagaaggatatgaaaaataaagaaggaggtgaggggaaccaagggcttagaaagggagcgggagagtcagcggaatgacaaatgtctgaaagactgtgatggatgggatggcatgtcttgagtcaagagtggactgtgcttgggaaggtcttggttttaactgacctggtggctctaagagggaggaggctgccacagtgagggaagaagaaagggacactggccagacagtcacatcgagcaaatcagtttggataaggataggaggcagctagagccttgctaactggataaaacacaagagaatgaattgggaggaaaccctgggagagaggagggggacacctggccagtgatacttttaatccaggagagttgccagtgagtctgggactaaggagagaagttgtgcagagttataaatcagagagcttaaatgttgccaggtgttagccctaccaagcgagatggaatgttaacagcggtttttttaggtaaataaaagacttgaaccttattaggggtccatatgtgtaattagcaaaccttttagaataaaaagcaatttacaaagtactcttatggaggcttgtgtagtattaaacacacactgtaaataggttaaaatgtggcactgtgttctttaaaaggctgacatttgtcttttgaatgttcataatcttgatttacaaactgatagatggggcaaaactatttttttttttgcataatatgggtacaagtcattcaagaaggatcaaagttataaatactgtggattttgttctcaggaaatttggaagattttgattaaaatttaaaacatcaataatttgcattgtagaaatggttttaaaactataaatggcatttaagagctttaaactagcacaaggactcatgaaaaatctgtatttggcattattttcctgttctgtttgtatagacttaattattcactggataatgatacaaaagggaacaaggctgactagattcttttggccttactatttccacttttggaatttcttatttttgcacactgttacaacttcaaaaggaatgaggctatatacaataacaattcagtatcttgtgcctaagttttcattttcatagagtaggcagagtggccatagttactgagtcttatgatgctaaatcaggtcagacagactgttcctttcatagccttattctaataataacctaaaattgtttcttacatgctttaatctactggccttgcattctgtattaagagtaacagaataatttaaacatgctttgctcagtcagcagagttttaaccccttcatctgtttatttttataactaaaactgaactagtgtcacagtggatggaatgagtgagtcaatattttcctgatgtttgctggcaagtatctgcttcaggagtaatgtcctatagactaactcagttggtgagtgagatgggattgtgtttcacagataaaaagggaaaaattgatatgattattcatttggtttgggagaatctgtgcttttcccttaaaaaacaaagttccaaaagcatcaattcttatttttattgatattatggtacttctaatacataaatatttaaataaatttacataaactattttttaaaaactgtgtgaccctcccatttgttaataagtaaacatatctgataaggcaaatttatatttttatttagttttaaggggtagtttgggattactgtgtgtgctttgttattcattttattttaatcactgattagttttaaacttttttttggtttgtttttttaaaacaggcagaggattttagggatgtgaaacatacttggcttgtttccaaagtaaaaaaaaattattatttttttaaagccaaagctccttctgctgttttcattaaaatctcaagaattgttcacattgccaggagcagttctttgaaaacagtctgatgtttaatcaagcagtgatatgtgattttcaaggtcatttttgttaggacagaagagaactcaggaagattaattttctcaaacactgataaaatttaaaattgaataacagtctgagtagattttattctagagctgtaaatatcaaaaattcataccattgtttcttaagaatcatattttagaaattaaattaatatttttctatctttttgaaaaagtggattcttacggaataaaaattttaaaaagatattcctagccttggtgcagtggctcacacctgtaaacgcagcactttaggaggccaaagcaggaggatcacttgagaccaggagttcaagaccagccagggcaacaaagtgagatcccatctctgcaaacaaacaaacaaaaaaagctgggtgtgatagtacacacctgtagtcctagctactctggaacctgagacctgaggtgggaggtggaaggatcacctgaattctggaggttgaggctgcaccactacattccagcctgggagatagagtgagagcctgtcttaaaaaaaaaaaaaaaaaagttcctatttgactttgacttcggaagtatttattcatattgcagggaaggaagagtggattttcttttctatattttgcttagcctaatataaaaaatttctaactctttaatatttaagacgtcagttgggggatggatgtcaagaatcatgatgaattggactatgaaataacagtatgaatttgaaaatagttaaaagtaaaatatattaataaccaactatataaatgctgctataatgataaaacttgatgtttaaaacttaaggctgggcatggtggctcacgcctgtaatctcagcactttgggaggcaaaggagggtggatcacctgaggtcaggagttcgagacaagcctaaccaacatggtgaaaccccatctctactaaaaatacagaaaattagctgggcgtggtggcacgtgcctgtaatcccagctacttgggaggctgaggcaggagaattgcttgaacccaggaagcggaggttgcagcaagccgagatcacgccattgtactccagcttgggcaacaagagcaaaactccatctcaaaaagtaaatgaataaataaataaataaacttgatttaggtaggactccaaatcatagttctgaagcctcattagcttctcatcaggataaaaatttacatacctcactgcggcatacaggatccatcacctggctcctgactttttctccaacctcttccctcattcttcacctacactcaattctcctagagtttccaaacatgccataggctctctagctagcctgcctattgtccactttgcctgtccgctgggcccaattcttcacttctacccttccttccactcccaggtagctggacacatttcctctgttctatcacacacttctttttgtttttcatttttgttattacatttttcccattacatggaaattctttccagttagaactaggactatgatttactcctctttgtatactcaggatgtagcatgcagtaggtgccccctggtaatatgggaatgaacaagcagagcccatgttgtgctttgctgttccaacagaaaatgctgtagtccttcctgtccaccagagagtgctgagcaaagaatgctcttttgaaaaatcaaagctgtcagatactggcagggcagtatgacctgtagagatttaatataaatcagtattgcctatttccatctttgaagttaaattagaacattagctcaagccattgaggacttccccgatccctgggaacagttgtatagatatggtattgttcctgatctttgatgagtgaaaacctgagattttttttctatactttgttggctctcacagttccaattggagttccaataggaattgtttttttttaatttttttacaaataagttagttttttgagtctatattctactcatctaattgtgttaaattcatacataacattcaaaacagtttgttctaaatttttaaataatccagtaaacctcaaccagaaaagtgcaagccaaaagccaatcatctaaccaaatgtattttcactttgggaacctaaatatgttgtagaggcagccatctttattcccattaaaatgaacgcatgatgttattcttttttttgtttttaaaaaaatgttcatagaatgcattccaattacttgagctcacaaaaggatctttgctttccaacatctataaaaccacacacttgtcacctgtcatatttcacccagtaggtgatgtgttcagggaaattaggatccgtgttttaatcttctcatgtttccttatcagaacctagcctgctggtatttaattagggggtgctcaatgaatatatatactgaatgcatcttgagttctttacgtggggactttctggacctcctgtagctctcacctgttcctttcgcagtcccttggccttcactgagcctgcttgacagccatatattcctagtatactgagcctaatgcccccaaatttcccttgctgctacttcctctaggctctagagtcactaatatgctgcagcttcaagagttgccttcttttcaaatcctccacagcacaccaagctttattgttttctgcctctattctgtagtaaaggaaaggtagaaatttcaaataaaacaatttcatatgtttaataagaaattgaatggtgtacatgtttacattgaatttttcaaggtaaagcaaagctgataaaatatttgccagtttagatttcttaattagcttttccctttttttcattatctagcaggttttctactgactagatcacaaagcaaccagtgttgtttcgttattggaatcggataaattgatcttagttcagttcaaccaacatttcttgaatacctactgtctacaaaaaccatagatattatggaaaattccaaagtgaacaagatataaaagtttgctagagtgtttttcaaatatggttaagtgtgtaataatagaggcataaagagaagtctctgagaaagacaagagtgtgtaataggtttagaactggaaaatcagggaaggctttataataaaggacttgaccttgaaggaggaaggcagaaagaacaatgtggttgtagctttattcatttgttttcaaattattattttagtaaaattttctctaaagatctatctttttatttataaaaaggagtgatagaagactaccaggtaattaccccacttctatttactatgtaattgatacattggttgtttcttgattaataatgatggcttcttgtattagtttttgacatggccctttaaattaaaataatgtgttaagaggtaaacatgtttaatataaaatgaaataacaacaatgaaggatggctatttctataagctgtgtagtatttctaatgctattttaatatatgttttatttatccatgggttttaggcagcttggatcttaaaagcaagagcgctaacagaaatggtatacatagatgaaattgatgtagatcaggaaggaattgcagaaatgatgctggatgaaaatgctatagctcaagttccacgtaagtattgggttttcagttaagttaatgaaataccattaagaggaagaatactgtgtataagaggaatatatatgcctatatatttctacactttatatatataaacattatagacatgaaacaaaaatgatgaaaaaaccattacttcaagtaaatggtttctgttctgccttatggtacaaaggctttttccccacaattcagttatcttaaacttaaggtatgagattgatgtataacaattttctgatacaagctatattatgcattttagaaataatttatacctacattcaactgctgatcatatgggaaaaatttataaaagtacattctatttgaactacttgtctaatatatcagaatattgtttatctgggaagtatccaaacaacagaggtgttctaagagcactttaaaaaaaggtcgttcgaaaacatcactttattcttataatcgaacatgatttgctctaaatcataatgtgaggtaatgaggtgatatgctgggctgtgagtgtctgttgggattgtcacagaggcacagtccccagcttggagatgtggtggtacaaatggtattggataatggctgatctaagagtgttgtttacaactaattgatcacaactcattacagatttctttgttccttcttcactcccactgctttacttgactagccttaaaaaaaaaatggtattgaattataaccaggacatatggtggtcttgctggtaattatagttctcagtcatttatatcttttggaaggtaatagctattttaaaccttcaaatagaaattgagaaaaaaatacatatttttatgttaatatatctttctttaccattattttgttcttttagaattaaaaatatctaaattctagatattgtgggtaaattatcttttattgggagaagtttgtatgagaaataattgaactatgaagatagaaccattattttgaactttggagcctgttagtcttgagtttaaatcccagccctactaataggttgacctgtttacttaattctgtgaacctttgttaaataggttaatactacctactttacagacttaatgtgatgattaaatgtgatgacataagtaacatgataggtactcattaaatattagtctaaaacacatctccctaaaatacatttcttgctattaatgtctttttcaccaggccagcgcaattctgaaaattgtattagcttacagtttttacagattaatagataatatataaattgtattagccatcttgtctcctaggccctggaacgtctttgaaactccctggaactaatcagacaggagggcctagccaggccgttaggtatgtacttctgcttcataacctctgccactaaatattgatcagactgtatgagagtctttcctcaaatgatcttctttgtattataacaatttataatcttcacaggccaatcacacaagctggaagacccattacaggtttcctcaggcccagcacgcagagtggaaggccaggcactatggaacaggctatcagaacacccagaaccgcctacacagcccgccctatcaccagctcctccggaagatttgtcaggctgggaacggtaaattctatcagctttcccatagccttgtattactttggtattaccaaagtagctttatattatggtatatcattttcccctgttgttatagtggagaattatatggaagatttttgaaggtgattatttttatttatgttgcctttatatttttatgcatattaaacttgtttacatttcaagagaaagtttcagatctcttggtctattgtttttcctctgtaggcttccatgcttacaagtcctgatggaccatttataaatttatctaggctgaatttaacaaagtattcccagaaacctaagttggcaaaggtatgtacttaaaatgattttgagttatgaagtaatattacacgtatgatgataatgacaaattagaaaatgaataaaaacttgtgaaggaaaggccatgtctttattgaagtggaaatgttttatatgtaaaattactcttagtctttgagttaattgagttaaggaaggtcagtcagaaataaagtacatataccattattataggaaattcttttcccttgataaagagtagtaatttgtaacaaagaaagcaggtatgcagcatcatctttgtagaatgaagcttaagaagtcatctgtatatgtacgtatttttttcctttttagcttggactattctcagagaaataattttctatccttgtaggttttttaggactgtcaaaggatgataaaaattatgtactcctaattagtaatttatcaggcatctcaaaaaggattactgaaaccacatagtggcatgccaaccacattagtaattatcactactcaaagattaaatgctcctttaaattaaagagaaaatgagaggcagaaggagagggagaaagggaaagagaggcagagggagagaaagagaaaaagaaaaataaaggaaggtgtccatgaccttttcagtatataaaccttgagggtgagcttgcaataattcagagacaggagcacttatcttccagaaactaatttaagcctagctcaggtttttagctgaaatctctgagcataagtgctgagctcattcctaatctcagttctaatggtgtttaacgtatgtgtttactaaataccaaacactctagagaaaattaaaatggacactagctgtacagacttaagtttaagtctgaaaaaaagatgccatttggtagacagggaattagccagtaataattgctgctgatttttttcttaaattcttgttcagcagcaatcctgttgacttcatttagtaaaattgtaaagctatccttacttccctttcttttatgagagtggagtagtgaaagcaactcatgtggaatatctggttccctaccctttaaggtcgcttacttgaagggactgtctggctagttgataccattgctattttttgaccagagagtcagtcagtggaagcatttttctcaattaaattaagatgcatccaggacagatctggtctgttactagatttagcctgaactagattttgtgcttttttagtgtgttgtagaaataatgccaggtttttctgtctttggcccccagcttgccttgacccaaaaggagtcatttttaataaaggcatattgcttggggtgtctagggtgactctatgacactgtctttgatgctgtaacgtcattttcatggcagtagtagcaccaattgcactcttaacttttgtttctttataacagaacaaatggaaggattgttataggtttgtttttttttttaaagaaaggccttgtcttgatttttttaaaaaattggttgcctccaagtcttctttgttagtaaccttgatattttccagggctgttagcctctttgcaagtgtaacaagatggtattatggaaaaaggtagtaccaataagagtaaatgcttatttgtttagaggagttgagtgaaatattggaaataattgttcttagccctggctgtacatgagagttatctgagggctttaaaaaatataaggtcagggctttgccatccccccaactctgatttaatttaagtggtctgatatgtgccccaccgccaggtgattccaatgtccagcttagctgagtagcaccctgctaaagaaacctgaatattctgaatcatagagttactatgaataccatataaggaaaaatagctttaaaaattaagcaaaaaacaccctgctttacccttgtactctactttgtttcagtagaaacttccagtttttttatgtctaaattatcattattaatatcataatcactgtataatatatgtagagaatataaagaattgtctgcatctgttttacgacaattctgaagttggtctttaagaaataaatttttcaattgtctttctaataaaatacataatacgaaaaaaagtttaattctttgagcattccagtttgtattctgttaaaaccagaatcagttataaatagtaatattttaaaatgagtgatagtaacaaaagatggataggcccttttatctataaatccagggctttagagtacttttgttaacagcaaattaaaaaaaaaaatctaacgtatttttgacacttttttcttcacaggctttgtttgagtatatctttcatcatgaaaatgatgttaagactgtaagttttgaattcatgctattttcttttattgtaatttttctgactttggaagtttagattctgaaatattctatttctgaccttataaacagatgaaattattaaagattggagaactactaatactttaaaatccaccctcagtttctgtgggaaaatgtgtataaatatacaagtgataagaactatgcttggttcatagagtatgtagatctccaataaatgggaagatacaggttattgagaatactgcataacatgcttgtgttaaagttatagtttttatgctaatggtgttgttgatctgtttatttccttagtccatatagtatattataggtttactaacatgcatatttctgttatttttgtggtgtgtccttttccccatcattaacgttttatgatcaaagatttcaaacatacaaaagtagagggaatcgtcttcatagcctcttaacagagaattttaaagttatatgcgtatgacttctcaaattgttttgatttttgcatacttatatgcaaatgagcaataatggaacaactttggtcaaatcaaatgcagttcattctacagtgtctgattgcatgttttctcattttcctattagttccaggaaaaaggctttatatccatacattaagcatttaggaaaataaaaatgttttccttaattgtgttttctttttttcttcttttttttttgagacagagtctcactctgtcacccaggctggaatgcagtggtattatcacggctcactgtagccttgacttcccaggctcaggcgatcctcccatctcagcctcccaagtagctgggactataggcgtgtgccaccatgcccagctgatttttttttttttaattatctgtacagacatgctctccctatgtttcccaggctggtcttgaatttctggccttaagtgatcctcctgcctcagcttcccaaagtgctgggattacaggtgtgagccaccatagccatccccttaattgtgttttctatgtgtcaaccactagctatacactaggagaactaataaaaaatatgatactttttcctgcctctacaagccatgtaatctagctgaagaaataaaatggacataaatgaaatagttaaagaggtaattgtcaaactgtgaagttgttaccaagtaggaaagggaaaaattcagaagggatgatattagtaaagatccatgaaaataagtagaatgtatggaaaggaggaaaaagaaatgtaaagaaagggcaaaaacaagaaagagatatggaatgatcactaaatcgtccttatcctagaaaattggagttccacagagacattttaaaaaaggaagtgacagaacttgatgatagatttgatgctagggacaaaggaaagacagacaggtcaaatttgcctcctagagatgctgtgagaagagtgatagttttattggcagaaatgggataattagggaaggaagtcagtttgtaaagaagctgactaagtgacttgaaggcgttttgagcttgaaatgacaaaaggctatctaagtggagataccattgcatgtgttgggagatgtgacattgaaatgtaggggacagcctgggccacatgtatagaatgtggtgttcatagatgtggttatgtagggaaaagaaaaaatgaaggttgggacagctgagaaaccatgcacacttctgtaaataaaagtcagccattttaacttcataaaaagctggtgaggggctttcagcatgatgatatataaaattatatggtcaaactgtaattaaaaagcattagaatgctattccatttcataaattagtaaatctcaaattactagagtatcataaagtgatactcttgtatttggaagattaatgcatatcaggggcatttattctttcatccaatgtatgtttgaaccacagttccagccctgagatcacacagtgaaacagacagacaaagtctctgctcttttagagataatattctggttgggcaaggaatagaaacaaactttaaaatgtatgaagtcttatgggctaatgagtactgtaacaacaaagaagcaggaaagcagataagggaataaataatgacgtgggggaggatgctattttggatggaggggggagtggtcattgaagtctctctgaacagaaaatatgtggctcagtggctgaatcccagcactttgggaggctgaggcaggtgtatcactggagcccaggggttcgagaccagcctaggcaacgtggcgaaaccctgtctctacaaaaaatacaaaaattagccaggcatggtggcacgtgcttgtagtcccagctactctagagggatagagctgtagtcccagctactctgggaggatcacctgaacccagggaggtcgaggctgcagtgagccatgatcatgccactgcactccagtttgggtgacagggtgaaactctgtctcaaaaaaaaagaaaagaaaagaaaacattctaacagacacctcaatgaagggggacaggaaccacatcattatgtgtaggaagagcattttcaaagagctttaactgtaaaggtcctgagtagaagcatgcttgggttgtttaaggaacagtaagaaggccagtgtggctgagtgaggcctgtgagggggaagagttgttggtgatgagtttagaagctaggcagatcataagccatttgtaggtcatggtgacaatgttttttattaatagattcatcttgaagatgtagttctacatcttggaatttacccattcttattgaggaataaaaatcacattgaaaaaaatgtaagatttattccctgcactactgcacttaatattctaaagattctaagggttagccgactgtaatttttacatattatgttagtatcatagttcttcatgcatatgaacttaaaaatttttgattttaaacagatagagtagtaacatttaaactttttattttaagcagcaaaatccttttcttcaagtgaaatcttatcgagaccctaatacgtaaaacagacaaaaggtgagctacttgaattatagcagggctagcaaacttagaacatatccatcagcctcctccttgctcgtcccaccccatgatcttctgcccctcaaatattggggctgttgggtagttcctatatagggctctgcttctaaattacctggggaattattaaataaggacttctggatctgtgctagacttcttgagtcagaatcctcaagggtaggtgtggcgaatctgttgttaataaaagctccgcaggcaatgctaattttcaggcaggattggaaaatactgccttagaatatagtagtttaaaaaccaatggttaatagacgggtgtaatgccaggtgttcctgtgtagtaaaatagacctggggaatattagcagaactcaaaaaccagagctccctatagcaaacaaaacaagagggaggtgtgttacctgtctcaatgaaagaaatcagcaaatgaagagaaaagagacagcaaacatgactcaaacatatctcattaacacggaggtgatagtaaaaactattgagaactggagtccccatttataaattatatatttttattcttggtaacagtgactctcttaaaacaccaaaaccaagcaatattgaacaaaatcgttgactcttttatctttatgattcattaaatgacacttgagaaaatttgtctggggactttattttagatatttaatcaatgaagaagaaaaaaaattgaaactagcaaacattagggtatttcataaagttggttggatttgtgaaacaatcacaaaggaaaaagacttactgatgcatatgtgtaatctctatctagtggacagaaacaaaatcagaagtaaaagggcaatagaagggggaattatgtacatgaagcatgattttgaaatattggtatttatcatgtataaaaaagctgatcttggctgggtgcagtggctcacaactgtaatcccagcactttgggaggccaaggtgggtggatcacctgaggtcaggagttcgagacaagcctggacaacatggtgaaactctgtctatactaaaaatacaaaaattagctaggcataatggcaggtgcctgtaatcccagctactcaggaggctgaggcaggagaattgcttgaacccgggaggcagaggttgccgtgagcccagatcgcgccactgcatttcagcctgggcgacaagagcgaaactctgtctcaaaaaaaaaaaaaaaaaaaaaaaaaagctgatcttaatttttgaaaaatttttatgacaatagaaatgaccccaaaacagaaaatttacattagaaaaaatgctggtaaataagcacattagaggtgtacttttttaataacaacaaaaatataaaataaagagtctttggactttgagttttatatttatgaaattagaaaaaaaatcctgagggagagtacagttagttgtcatacattataggtgatattacacatggtaccacaatttggaaaacaatatgataatatagagcagatagccttaaagatagttcctcaatttgtttctgtaatttcacttctcaggagattgcaggaaaaactaaagtgctgtatttgcaatggtgttcattgtaactttagatatagtggcaaaactatatctaacctaaatgtttaacaatagggaatgagtttggtaaattataataaatagcatgatggaatcttatgtagccattaaaaaccataattataaacactaggcagaaacatggaaagtgtttattttataatgttaagccaaaagtataccatttagtatgttaaatagaagtataactctaaaaatatgcatttatgacagatactagaaggtattacttaaacattaaagtggtagtattttgaggttaagatgtattcattccacaaatatttgttgaatgcctatgttgtacctcatggtactaacggagattaagtctaactttacctttgttttaaaatttttcaacaataatgttatagtaaaatgaattataaattaggggcaataatatattaaaatgctgccaatttgtactctgcttgttattttcatctgcttacccccaatatacatacattttttgtagaacataaaatggagcaatttgttttgttcttatttagtgagaaacacaaattgttcctttgttttccattttatttactaattcatatattgatacatgcgttgattagtttattctttaaataataatgattgggttgtatatattggtactttgatgggtgctaggggtgctgagttggacagatgtcttgttctgtttctcactctggtacagtcttgccacattatagtgatgttgtggatcagattgttccattaaaatgtcattcttgcttttaccagaaatgttcttttctgaatggaagaaggatttagataataagtataaagcatgtatttttatatcttacatatattttgtaactttagctggaaaaagaaaacaggaattctgttttttaacatgttaagaaatcagaggtgttttcatatttagataccttgggtggcctccaaatttctctttaaataaagtatttaacacaaatacagagaatattatagacaaatataagaaataccttgaaatggtgtttaaatattaagaaagtataaaattgattgtccatggaaaacgatttttctgtctttgagcttttagtgcttttctcatgttgtgggggtgggcagtatcaacgaaactcaggggacacgtgggctggtgattctgtgtttatctacagactaataggaagaatactgtagagacagagaacgccatgcagtggtatttaaatgttaggaaaaagtaaagttatatatggaaaactatttctgcctttgagtatttaataactccctttccccacctttccctttttggacaatattgttggtatcgacaaaactaaagtggcatgtgggttggtgattctgcaatctttgtttccacatgctctttaatttcatcatcctgaagttgttacaactataacaacagtgaaaggatgactttttttaaacttagatctgccaaaattcctcctacttttggacttttataaacttactgctttaaaaaaatggcattctgagcttttattaatatctagatattggttttactaaatcatccaaaaatcattaaagtcttatttattttaaaaatttgggaatgattaaagaaatatagatctgtcactacttaaaaattttaaggttaatagcttttaattatgaatcttattactatgacaattttgtttggtttttaaggtgttgtcaacagacgtcagaaacaaagattataattaattcagtcaacagatagttcttgagtacctcttctgtgcacagcaatattccagaacaacagcacagatgtaaaagaggattatctgtcctcagggagcttgccagccacttaaaattgtcccagatgggccaggaatggtggctcacacctgtaatcccagcactttgggaggctgaggcaggcggatcaacttgaggtcaagagtttgagactagcctggctaacatggggtgaaaccgtgtctccactaaaaacataaaacattagctgggcagggtggcacatacctgtaatcccagctactcaggaggctgaggcatgaagattgcttgagcctgggaggtggaggagtcgagattgtgccactgcactccatccagcctgggcaacagagcaagactgtatcaaaaaagaaaggaaagaaattgtcacaaatgtttttctttagtgccagtgaggacagaaaaaccaaattctgtcaaaatatttaaagaggtttattctgagtcaatatgcgtgacctcggtctggggatacacagtctcaaaaggtcctgagaaagtgtgcccaaggcaactgggttacagtttggctttgtacatttcaggaaagtatgggaattgcaggtaaaatcataaatcagtacatggaaggtatacagtgattgggcctgaaaattctgtacatctcgaagccatggcttacaagtcattggtgggttttagggattctttagttggcaattggttgaaaggtaatctttgtctaaagacttgaagtcagtacataaggatgtttaagatcagggggtgtctgccatctctcatgtgatgctacactagagtcagattggaaaataggctgcattataccagcttagtttaaaaaaactgtttaatgagattttatggtttgtggggtctgcttagaaaggatttggggcaagagaaaaaaaggtcagagttcagtccttagcagcctgagtcttcatcattataatttctttttgccatttttattctgtatcaataatttatattaatatccttaattggattagcacaaagatatgggttctccataggatgagttgttttaggaccaactatgcaagcaaaaccagcaacctgtaagaagcactaaatctaaccttgggaagttagaagacataaaaaatttttgcatgacatctttttctaaaaaatagaaggtctgtttatacaaagcatgagaaggactatggtctatttgctggaaaaaggtctttataaagatcaacttaaaatgtttagatatttaccatgtatgcctgaattaagctggctgaaaatatatttttctagtatatctgaaaataatgctaattgtagttatacttttctcctcatttttttttgtttcatttttatttctggctgggggcagggtggtgggggagaaaaataagcatatgaaagtactgtgtggcttctttttaattttcatagctttcaagtagagatgctgatttttcaagtccattagaggctcagcatggtgtcaccatttctttataagtagtttgcatatttaaagatctcccctggagcaagagaagatggggaacacaaggaaaaataattaattatacagtaagattaaggaactcgcattcatttcagaaaagagttggtattaagaagtggacagtaatctgggatgtgttttgagataatagaactgaaaatctaagaggtactttaactgagctcttggatatcatgattatgttaacactggctaaagaataaaaaactttcagccttgagagaaaaatcgtattacaaaaaatcagaattctctcttaactagtagccccagcttctattaatcacatctttatctgagcttcaaatttctacaaagactgatttgctttccctttgtcaaaaatggtttccacctcctctatgtaaaattctaattcttttttagtcacctcttgtctaatcttgaataaacaatagagggaacaaactcgagggtattaaagatatggggtaaacaaatgtaaaatatgaaaacaattgaagagaagatctttttcagtttgtggcaaagggcagtctgctccttagaatttactgggacttaaggtgatgtcagaaaagtgaaatgatggttgttgaagacaacagttatccaaatactccagctcctttcactcttcttcatgatcccattttccaagccttttctctacctgcttacttaatctttatttctctacatctgtcttgaaagtgggcactgccactggatctggcttacacaccgaagacttgactgccacggagtttggaggcattttgaatcattatacagtagataaatcagggggagtgggtaaaaacttaggcattttttaatatcaattttgtgtcttgtatattaaaattatattcaaatatattatacatctgcttccctttgatgagtgtttttatctcatctgctattagccctctggtctggaactgattagtgaaaattggtggggccatctggaaacatgagcaacttgagtttctgtcggatttctaatgcacattttgattggtgctaattatatggtctatttcattatttattttcctgactgcttattgttagaaaagaaaatactaatctaaaatgaattgttttcaaaggctttggatctggctgccctctccacagaacattctcagtacaaggactggtggtggaaagtacagattggaaaatgttactacaggtaaatttcattatttgtgaagggcttagaagtggccacgtattttagggtctcaaatctgatactttttgaggggggggagattttcccatgaagaaatgagaactgtgtctttgacttacttgataaagcatttacttaacaatcacagggtagcaataagaattaatacctttagaataataaaactttgagctgggagagggaagctttgagaccatcaggcccaactccccttttcacatgaggaagctgaggccaagacagtggctgtaatttgcatcaggagctagtgagtaacagaccagggactagaaccaagtctgctgatttctagttctgttctcttggtaatcaaatctttttatttacactgatgcctcacatctgtaaaacacttcatagttaagagatactttgttcctacattataccatttcacttaagtctcacagaaccttggaggtagtggctatcgttagtccttttcccagatgaaaaaaattgagcctcacaaagataaagtgatttgtccaaattcacgtaaccagtaagtggcagaacaagaatttgagctccctttctgacgccaattctcttgctgtttccacaattccatattgtttctgtaggacctgagtatttttatattctcttaatgtttcaatgtattttaaagcaaattaactgagagatcagaagagtcgtaatgaattttatgaatatttatatagcaactagtaaataagatctgaaacttgttgctgatattgaaatgcatatagaacatttggaaaaatagaaacaaatgaacaattctatttttaagtataaatatcttttattattaaaatagggtagacttcagttactatgagcacacttcaatatttataagcttcagttgtcattcaagtactctgagaaaaaagaagactataaatgggacaaaaagcatgtttattgttctgccgttgaaattaagactactttccatttagatatttcacataaaactctaaagtgttttttcctgctgctagatggagaaagtgttttctgctaaaaggtaattttagaccattatatcattaaactcttatgaatgtaattcctggagacagtcttgaaatcttgagctgccaagcaaaaccttcagaaatgcttgataattaaaggaaagcaaaactctgattccttttgccatccatatacgatggcatttaaatgagtgtaccttgtcatattaaattatccttcttttctgttctttaatacctgcccatctttatgacatattcagtattctttcacttatacattcattcattcactcagtaaaatatttaatgggcagctactctgccaggaactgggagtacaaaagattagattgtccgttctttcaaatggtttacaatagaatggaggagagaggacagtaaataattacgggttaagtatttcttatctgaaatgcttgggaacagaagtgtttcagattttgcaatatttgaatatatttaatgagatatcttggggatgggacccaggtttaaagatgaaattcatatatgtttcatataaaccttatacacatagcctgaaggtaattttgtataatattttattttattatattttttagagatgggatcttgctctttcacccaggctggagtgtagttatatgattgtggctcactgcagcctcaatctcctgggcttaagccatcctgcttcagtctcccaagctgggattacaggcacatgccaccatgcccggctaattttttaaagctttcttttttatagagacaggttcttgctatgttgcccaaggtggtcttgaacccctggactcacaccatcctcccgccttggcatcctaaggtgctgggattataggcattagccattgaatcctgccatactcccattattatgtccttttcaatgaaaccaaattcagcattccctaacatgctgtttactttactgcctatgtacttacgttcatggtttaattttattttggaaatgtcgctcttccctccacatctggctgttgaaatcttgcctgtttactatctccctgaacctcctctgtgctctcaaagcacttttttcctgattgaccataatatgattaaatttatttgtgaacatgttttgtttcattctttgattatcattgctttaaggacatggttgttaccttcttcatttttcatctccttaccatcacgaaataagcacgcagttgacactttacagttttgttaactttaagttggagagaaaaagttggcagctggactctgactctttgatactggccggtgtttataaacttgactgatgttttatgccttgactttctttgaacatggcatgttccattttctttgcacaagaattcatgtggtggattcctttttgatagtattagattaagttctctcttaaggctgtagtaataaagaacatggttctttggctttcatgtagtgtaatatttctgattatatttttatttttaaaatttatctacattgtttttaaaataatctatttctgttttcatattcttgttttatatgtatctttttattgtaatcccttttaaatcatttttggaaagaaacaagttagataaaaatacacagactctcatggataatttaaattcatggaatttagtgactgtatttcagtcacgtgtttaagacttgcatgcatggccaggtgcggtggctcatgcctgtaatcccagcactttgggaggccaaggtgggaggatagtttgagcccaggagttggcagccagccttggcaacaaggtgagatcctgtctttaccgaaacaaaatacaaaagttagtcgggcatagtggtacatgtcagtaatcccagctacttgggaggctaagacagaggattgcttgagccccagagggcaaggctgcggtgagctgtgatcccaccattgccctccagcctgggcgacagagactctatctcaaaagaaagaaaaagatttgcatgttcagttgatgttgtgtacatatatatgttggttttcagaactttagagttctttgataacattttataaatactccctgtgaaactgtgggacctttgaagaggtaggggcttctgccatgtcccacatcttctcactttagcctttaaccactttaatcccaaggcctccaatagctatttgggcatcagccacaccaatgcttaaggtttaaggttatgaaaaatgatcaaaggtcttctttcaagcctttaaatgaaagtagcacaatggagcatactgtatatcattttgatttgatttcacaaaataaaacattatcgtatctgagtagctctcagatagctaaaaaatgagtggttatgagtaagcctaacaggtctattaaggacatgaatgaatagacctgttgaaagttgtgtgtgttttaatgattgaattagtggcaacagattctttcctgggtgtaagaggtaggccctacttacatcaggacagtcatatttaggcaaggagcaaatctcagattcatagactaggacaatcagtatcagatatctaataagggaaaacaagatttctagaataataaaatggtataactatattacccaagtgctaattattacttacatcagaatagcttttaaagatagcttttaaaaatgtgcttttgtctcagagcagaagagattttcaaataaatgtcatccttcagctcttccagtaatatggagactctaagcatttattcaggtcacttgccatatgtccagctgatcataagctctttgggtggtgaactgatgtgacctggcttactagcagctattatcttagtcctgctgtgactaggcttcagacagactctttacataccatttgggggttagaagccagtgaatatgggagataggcaacttattgctaagctgtataaataaacatgttaatttatgtgtatgtgcaacattaccttccttggtatgtgcttcctcttataatttgtctctattcatcctcagggtatgatgtagtgtttatttttaagttgaatgtctaattcttaaaattgctatttgtaggttgggaatgtatcgtgaagcagaaaaacagtttaaatcagccctgaagcagcaggaaatggtagatacatttctgtacttggcaaaagtaagtaaatcttaatttgagtgaaatctgccttctcagaataaatgtttaaattctggccattgcatggggagagtaaacagcttcttcaggaatatttggcaagttactatgtttagatttaacttgtttttctttacagcaagggaaaaaatgagaacgtatagagggtaactgtctcataagaaattgattgccatgaaaaataagaagacccatttgaaagattgcccattaggacaggagaaaataccataggctcactactcgcataggtaacaggccccaatgaggccttattttctacagtacctttgtatcccacttgggcaggtagtagagaacagggactgtttttacttaggttcctagttactcggctgaggcataataataaaaataatacttcacctttattgatcacctactcagtgtaaaacattttatcatgttcattatatatacagtttaaccctcacaataaccctgcaaaggtgagttttatcatttcctttatactcttaaggaaaattaaatttaaagaggggtaagtttttcagggtcccttggtggttaggagttagcattcagatccaggtctttctgactccagacctagtcactgctgcagtgccacctgcagccacagcagaaatgatggggccacctaggattttctttctttcatttttttttttttttgagatggagtcttgctctgttgcccaggctggagtgcagtggcatgatctcagctcactacaacctctgcctcctagattcgagtgattctcctgtctcagcctcccaagtagctgggattacagatgcacaccaccatgcctagctaatttttgtatttttagtagaaatggggtttcaccatgttggccaggctggtcttgagctgccggcctcaagtgatcctcccgcctcagcctccttaaagtgctggggttacaggtgggagccaccatgcctggccagaattttcaatagtggagtaaagttacttcttgaccctcaccaaggctactttgaaagaaaaacacaagtggtggtgatgacatgattttgctttatctgttagagtttcttaaattaaaaaatgtggtaaaggagattcaaaagaagatgagatataaaaggaagtgctactagttcctaaatatgggaataaaaattaacatatgaaaagcaaaatgaaagttatataaatttactgtgctagtcttagtatgttttaatgactttcaaaaatgtttgaaactatctggtatctaactttatcttctatatgtgatatattcaacttaaacaatttttttttttctgagtaggggtgtcactctgtcacccaggctggagtgcactgccattatcacggctcactgcagccttgacttcccaggctcaggcgatcctctcctctcagcctcctgagtagctgggaccacaggccaccatgcctggataattttttttttttttttttttttttttttggtagagatggattcttgctgtgttgataggctggtctcaaactcctggcctcaagcgatcctctggcctcagcctaccaaagtgctagaattacaggtgtgagccatcatgcccagcttacacttaaagtcttaaagaagtttctgtgcatcatagtaaactttttggaaagagcttgaaattaaggctcaagtcacactatttgactatcatcttaattgataatcactatgttgttgaaaaaatatgctttttatttaactcttgttaaatacatggcttcacctgtttttccataaattgatttgtttattattccctacacaactatatagaggtagaatatacagtttttctttaatgtatgaatggatggttattatgtaatagagatcaagcagatttttgttctatcacaatgacacatgcatgcatatgttcattgcagcactattcacaatagcaaagacatggaattaacctaaatgcccatcagtggtagaccggataatgaaaatgtggtacatatacactatggaatactatacagccataaaaaagaatgagagcatgtcctttgcaggaacatggatggagctggaggccattatcctcagcaaactaacacaggaacagaaaaccacatacctcatgttctcactataagtgggagctaactgatgagaacacatggacacatagaggggagcagcagacactggggcctccgagagggtgtaaggagggagaggagcagaaaaaataactaatgggtagtaggcttaattcctgggtgatgaaataatctgtacaacaaactccccatgatatgagtttacctatataacaaacctgcacatgtaccctggtggctcatgcctgtaatcccagcactttgggaggctgaggctggaggattgcttgagtcctggagttcgagaccagcctggacaacatagtgagactcatctctaaaaaatatatatacatatgaaattcaatatatatttaatttatataaaaatataagattatataattataaacatataaaaataatataaatatataatcatatataatataaatatattatatattatataatatataatataatataaatataataactatatagcatgtttattataatgtatactatatatagtaatataatataaatatttttatataatatatatttacatatgttgtatatgtgtaaaggaaagagatcaagcagattttaggaacattgctttttaaagttcttaattgttaatttaaaaattaaaccttttagattatgtaaatactaattatatattatttgttatatttttaaaatatagaacttgtacagtcaatagtgtataaggtaaaaactgaaaagttattatccatacctctctctctcatctcaaactttaatgataaatactttagttttctattgtatccctttggattttttctcaaagcacacccttactgtttagaaagtggatccgaaaatcatggaaaaaaagtgtcataatcttatgttgccatacataaaataataatactgttttagaaattcctattaagtatatggtttactcatgctaatgttctaattgctaatgaagtggaagccattaagtgctaacttgctttactccctgacctcacaaacctgtgtcctctcttgttttggaaaggcctgtccactgcctatctctctcaggccttgttccatgggtcatctcctctttattcagcatctttaacctcagtctcctaattggtttcttaatgccagcctatagacataatcatacctgttctatcctaaaaagattttcccttgattctttcttgtctagttactattgccagtctctggcaatagtaaactcacagtaagcatttgttagagaataaatgaatgaatgctttatgtataacatgtggagataaaactataatgtcattattgaaaattaatcctgcacatttttgaaaattctttcttcttcttctttttttttttttgaagacagggtttcactctgttgcccaggctggagtgcagtgcgatcacagctcactgcggccttgacctcccaggctctagtgatcctcccatctcagcctcccaagtagctggaactacaggcacatgccagcatgcccagctaatttttgtattttttgtagagatggggtttcactgtgttgcccaggctggtctcgaactcctggtctcaagtggtccacccacctcagcctcccaaaatgctgggaatacaggtgtgagccaccacacccggctaaaaattctttaatgtaatatctaggagataatttgttactaatcaataattataaatgtcataacaaatattaattttaagaacctatacttttattgaaatgtatcttgtttttaggtttatgtctcattggatcaacctgtgactgctttaaatcttttcaaacaaggcttagataagtttccaggagaagtaaccctgctctgtggaattgcaagaatctatgaggtaattcatgttattattattattatttattgatacacaatagttttacatatttttgtggtacatgtgatattttaattcctgtatacaatgtgtaatgatcaaatcagggtaattgagttatctatcacctcaaacatttatcttttctttgttttgggaacattacaattctttcctagctattttgaaatatacaataaattattgttaaccataatttccctactgtactatcaaatagaacttattctttatgtctaaatatttttgtaccccttaaccaacttctcttcatcctccagtctccccacacccttcctagcctctggtaaccataattttaccttttacctccattagatccacttttttagctactgcatgagtgagaacatgcggcacttttctttctgtgcctggcttatttcacttaacataatgacttccatttccattcatgttcctacaaatgacaggatttcatccttttttatggctcaatattgctttattgtgtctatataccacattttctttatccattcatccactgatggacactcaggttgattccacatcttggctattgtgaatagtgctgcaataaacatgggatatctctttgatatacagatttcctttcttttgggtatatattcagcagtgggattgctggatcatatggtaggtctattttgagtttttttgtggaacctccatactgttttccataacaactatactactttacattcccatcaacagtgtatgagcattcattcccctgccttcacatccttgccagcatttgttatttttttgtctttttgatgatagccgttctaactggggtgagatgatatttcactgtggttttgatttacatttcccggatgattagtaatgttgagcatgtgttcatatacctgttggccatttgtatgtcttcttttgagaaatgtctattcaagtcttttgtccatatttaaattggattgcttgttttcttgtttagttatttgagttctatattctgataatcctttcttggatggtgtattaggtgattcttgcattgctataacattggtataagaatggacaaacaatccagtggaacagaatagaaagccccaaaatgtatcttccacaaatagacaaaaattgatactgacattacattccattctctctctctctctctccatatatatatatatatatatatatatatatatatatatatatatatatatatatatttagagatgggttctcactctgttgcccaggctggatcgcagtgacgtaatcataactcactgcagcctccaaattcctaggctccagtgatcctacgtcagcctcctgggtagctgggactacaggcttgtgcccccatgtccagctaattttttttactttttgcagaaatgggatcttactttgttgatcaggctggtctcgaacttctggcatcatgcttataaattttagagtcatgtcgtcaaattctatgaaaagtcccattgagatatcttccctgctatctaattattgtagttttacaataattcatgatatcaggttgggcaaattctaccacctttttcttcttgtttacagttggttttcctggccctttgctcttccatattgattgtaggattggcctatcaagagccataaaaatccctggaagcatattgattggaattacattgagtgtgtgaatgatggggagggggtgggtgggccgcctgtcttcccattctccatcatgatataactctccatttacctaggtcttttttttgttcttcagcaaatattttgtaattatctccagaaagatggtgtgttgagggtcccccaaaccacgctgagattcagtgatttactgggactcatagtactcagccagcagttgtactcactgctatgatttatttcagcaaaaggatacaaagcaaaattagtaaaaggaaacagctcttggggcaaagttcagaggaaaccaggtacaagcttccaagagctccctcccagtggagtcacacaggacacacttaattcttccagcagcaagttgtgacaactcatgagaagtgatgtctaccagggaagctcattagagactctgtatccatggttactattgggtgctggtcatataatcacacactgtttatcacacaacaaagactcccagaagtaaacaggcattcagcacaaaccacactgtttacgcaaacaggttaggtgtagcaagctacgcttatcatctggggaaatttcatatcaatgtagagaaccagccaaattcccagatacaggcctttctaagaatagtggtctcaggcctgctatgttaacttttttctatgcaggtgtattcctacgtataagtatgaatggaatccttaattttttctcttctattttctatttgattacttctggcagataggaatgtattactttttaaaactttttttgatactagcaactctttaaattgtaagatcttgttcataggtcctcttggatattctaagtaaataaaacaatcatcatttgcaaatacagatggtttcatctcttcctttcaattattttaccacttttaaaaatatgtcttactgcttagggcttccaatataatattgaacagacatatctctgttttcttgaaattccttgaaaatgctaggtatgatattttgaaatcattttgttagaaaagaatggaatatattaatagcttctatacctaggtgatagtatatgaattttttttatactttctgtattttctagattttccataataaacatgtattactttcaaaataaaagtattttaacattgtctagaaaaactatgatttccttttgaaatgtaatttttataaatgtataaatagaagcctttgatcaatcaatgaaaatattctggactctaaattgagtatgaataaaactttgaccaacaaccttaaccagtggaattcatgcttgttccaatggtaactatgccagtgcagttggagctctgacctttaggcccttgccttctgctcatttcagcccttttgcccttctcttcttagacaggaagtgctagcagaaagagctagagaactatcacatctttattgcatggttgctggtgggaagaattccttccaagcctctgttacagtcactgttgctgtggctgtgatacggagtagctctggagtggattccttttctcaacctttccctgctctaagttgactgtacacttgaaggaagaaagaagtggagaggaaagcatcttagctgtagggacaatcatgcacaaatagagtgatcaaggactaagcacagatttgaaatagttggtggcagtatttctgtcttttgccttgaatttgcatagctaatttccgttatgtaaaggtttaccacaccaaagtcagatttccagtgtattctttttctcttcatgtgacaatagatgtccagttaatcagtaaattggttttagcaccgcagcctgcactgtgtgtgcctttagggtttttgttacatacatcatgcttggccctggctggagggattccattcctttatgttctcttcttttttttatctttcattgttgaagatatcttttaaatattgtctattttaggatgaatatgttgaactgcttattgttcattgtttaaaatgatttatccttgccagatttctttgttggtggtttcagtttttcttgaggtattttgtttattcatttcaaagacaggtcttaattttagccattctttgttgaaaggcatttgcaattaaaaaccttaccctggaaatgttattctagaggtcttcaaactttactgtgtatgaaattaccttgggagtggatgggaagtatgacccatcctcttcctctgaatcagaagtcctggaaggtgggactcaggcatctggatttttagcaagcccactaggtgattgattctgttgcagaacaaaatttgaaaactactgcagcattcattttctgcagttgtttaattttattttaatcccagaactttgggatgcagaggtgggcagatcacctgaggtctggagttcgagaccagcctgaccaatatggagaaaccttgtctctactaaaaatacaaaattagcctggcttggtggcacatgcctgtaatcctagctactcaggaggctgaggcaggagaattgcttgaacccaggaggcagaggttgcggtaagccaagatcgtgccattgcactccagtctgggcaacaagagtgaaactccatctcaaaaataaaaataaaaataataataatttaaaaatctaattaaagattttgtgtctacattttgtgaattggatcaaaaataaccactaaaaatcacttgataccaaatttattatatacttgcaatggcatttatatacttgaaaatgtaattttaagtctacattaataaaatctattctagaactagtaaaatttaaacaactctgataaaggaataaagaaaatagagtcaatgtgtgttcatatatatgaaaatttaagatgtgagaaagatagcctattaagccaattgcattacttggttatttaataaatagtttaaaaatagagctggatgagtaatgatttatactattaattactgccagatttaaaactttaaaaatttaaaacttcaaaaaatgataccctgaaagttccagaagaaaacacagatgaattatttgtataaattggaatgaggacgatttttctaatcatgacacaaagtcaaaaagccataatagcaaagattgataaatttgagaatgtaaaagttaaattttctaaatggcaaaaacaaaaaatagaaaccaaacccatatacaacaaaacaaaagataaaaatatcaaacagggaaaatagttggcatacctgggacagacaaaagactgcttttgatttcctcaaactacacattgcttaaaaattgctgaaaatgggagatttaaacacacacacacacacacacacacacacacacgcacacacaaattctcatctatttagtcaagaatgtaaacatggaaacgaggtatttccatgtcatggtgtggcttttccttaggctcttgtttcctttcagcctacacagtggccattgaccctctctgtgaaagtaaaatcaccacagagatgagacaacaaccaagttccagctgcattgactataccgccccccttttgtacttagggcttggtgacacctatttggaagaacttaattaaccatctatacttttcctctgaagagaatgtttataaacactgagccttcctgtgttgttgaactatggtcaacatcaacacgggctcttttcatctggaatagaacacagtcagtgcccagggattcttgagccacacctcagcctccagctctcctgtgtccaggagggcagtgttccacccaagactcccatacacacaatcgtggagggacaaaagataggataggatagaagaacagacaaaaaatatgaattggcagttcactgaaagagaaatataaataatatctgatgtgttaaatgcctaacctctgtcataattaaagatataaaaaactaaaacaacagtgataagccatttttcactcaatcagatcagcaaagatgaagaagttctatgttatctagggttgccaagggtgtagagaaacaagctccatgtatgaacatttggaagttgtttgcaattattgatgatattttaaaatgtgcatgctctttgacctggccatattacttctaggaattttccttaaggatattttcatacaagtgcacaaagatctgtacaaagatgtttttatagcatgttttttggttaaaaaaaggaaacatatgcttgaacaaaaagggactggtttaataaattatggtctctgtattgatggaacactatgcagaagtattatttaaaaatatgaagtaaagcttttggttttgatatggaaagagtcaagacactgagagtgaaaaaataaactgtatattagaatgtatagaatgattctgtttatggttaaaatatgcacacccatatgtatgcttatgtatgaacaaaatttcctgaacaatactcaagaagctattaacagagcctctgcctactacaatttggggatggggcatttacttttaattttgtaccgttttgtaaggtttacatttatttagtataagcacatattttataagtttataaaacttaattgaaaacctacatacgaggttgtcagtacaataggtgtttcagtctaaaattcctcgagattacataaattaatttctgtgtccattaattaagtatacaagtattcaaaagtaattttatagaacccaaagtcttgaaccaactggcttattgaggcttgagccttctttgcattgggcgttgccacctttggaagctgtaacactgaagcctagcactgtgggatgctgttggctttgaaaaagaatttcaaatataaagcacatgaagaaatatatataaaacatagatttgggtcaactggtgaatgttttgttagggttttatgggactgataagttacatccctgttctccatgttgagaaccaactgagagagagatacaagatttcgacaaatagaggtcagaccattagcttgattacagataaaagcagaagtggagcttttggctttagacctatgctcaaaaggacttaacaaccttctcgctctgggttaaacagactaatctaccctgtcacaaacatagttgtaccaacctacagactttctccactcagaagagcttattatttttcataaaaatgttatgtatgtgaacatgtaataggtttattttgtgttatttagaatgaattaataagtaaatgtttaaagatagctcagttgcaatttctaatattaatctatataacttacataaacaaaacttcttctcagcaatttttaacagtttaaaaggaatcttagaccaaaacgtttgagaacctctgttctaatggaaacatgggaagctaagaacattttttagagttgtttaattcttgtttattaatttttcagtttctagaacactaaattttgtgctaagaaatggcacatatgatcttgctttaaaggaatttaccatatttcatggactctaaaaacacattttttttcacattttaacatctctgaacttgagatacatcttaaaatggatagcatctttttatggccaagtggcagttgccatgtagttgtcatagtctgtttatatggaaacttgggtaattactcttgggagcatggtgaacctggtaattattactggttgtagcctgaaagcttttgttgacacctgctggtaagatcaagaaaatcaagaaaacacaggtatcagcatagcagaatgactgtccataggttggaagaaaatcttggagacaatagtggagcacttttaagaaatattaaaagtggattttaaatgttcttaccacaaagtatgcaaaagagtgatctgtgatgcaatctgtgtatgagtatgtctaaatatcagtgaggatcaaataaaaattctgtttaaaaaaagcactgcatggtgcttcttaacaatcagtagagtctcttatatttgatatgattaaaatttaatgaaaagtatgagtccttctctaatgagaacaagttcacataataaacaccatgtaagttgagaggtagaagacagctatgtgaagtgaaggcattagggaaatcttcatgaaggatgtggagcctgaacagggccttgaaggtggacttgagaaatataacattcattgataacattagatgcatacatttatgattatcagtattttagaaagaatatataataactgtagaaggtttatttagtttttcattttgtatgtatttctaagcttggtcttggttgctgtcttttctttcctggacttttgatcttcctgctaccactctttcctattttggtatgtctagcatgcagcagtcaagttattctttcaaaatgcaaatatgattgttattcctctcctaatggatttctctcaactagaaaaaaaaaaatctgaagttctcaccgtggcttacaaaggccctggctgcctctcatctccttttgtgccactttccctcttcccagcctcatttaccttcgtgtggttcttcatatgtgacaagcacgttcccctctcaggctcatacatttgctcttccctctgcccagagtgagcttcccccagatatgctcagggcttgatccttcacttcactcaggtcttttcaaatagcacctcctccaaagtggccccttccgccaccccttctgaagcacactctccctgctctctctctccttctctgtttctcttcacagcacttaaccttctcttatattacatatttgtttgcctttcataccagatgtcacctccctgaggacagtgactttctctttttgttcatattgtatccccagggtctagaatggagtctggcacatggtagcctctcaataaatacttattgaatgaatggacttaaatcagtcagaaaaaaataattttttgtccaatattaataaaatattgctcttctctcttgatggagaataggaaatgaacaatatgtcatcagcagcagaatattacaaagaagttttgaaacaagacaatactcatgtggaagccatcgcatgcattggaagcaaccacttctattctgatcagccagaaatagctctccggttttacaggtgcacttcacatccaattcttagaaccactttcctgtgaaatattgataaaataataagaaagatggaatgaaagtatagagaaataaggtataggccatgtctttatgaaactcaaatgtcaacactgagatatataatgagcattgaagtgacatccaataatttggaaacatgcagatgtctggcatcttgcagaaacacactggacaactgactgagttttaaacctcattgtcattgtatgtgttagccattttgtcatcaaccaataagttgaatagttacttaaaacttatcatcatcattgcctccgttaataccattaaacataaagacactgaaattgaaaggtgaaaagatttgcaaagagcatttggcctcatgttctgaaccttgatgaggacctgaaacagaatcacctgttttgtgcagcattgttggttcttgtcccaatattttttcagtctaaataaattatattcactgattctcttttaagtacttatttcatcctacatatgacttctgaaattaatttttaaattatgatttcctccttagcccttgggtaatatagaaagagatgactggcagctgacaagggttctttccaaatatgtgttggaggcataaaatgtaataataagaacactattctgtgcacctgcagctgactctactccccaacccccaaagtgggtcatgggtttctcacggcagctgggctggattttcatttgctcatatgaactcgcttgtcctttgtcccatgggattaattatgcatagaagcaaatggggctcttgagctgcagtgtgagagctaagtggataatgtaaggatccgctgatggtcttgtcttcctcagtggaagctcattggagttcagtagacacagctgaagcacaaagtacagcgagccaaaaacgggatccagtcagctgaaaacgtagaggttaatgctaaacgcagtcctcaaattagattaggttttaggaatttaccctatgggcagcaaagctttataaagctgaagtgtgtgggcgttactttttgtgactatttcttattttggttctctaacaaagcatttggggagaaaacttagatcagttgtttgtctttgtctctagacacattccccatgactagtaccattatgaaagagaggtgtttgtatttgctttaaacattttttcatttactataacacgtatttatattcttaaggagtatcaaaaatcacaagatgaattcatttttaactgtgtaaaatatatatatatatgtcttaaaacttacaaagttggtctgacaccaaaatttgtgtgttcttttttgaaaaggcggctgctgcagatgggcatttataacggccagctttttaacaatctggggctgtgttgcttctatgcccagcagtatgatatgactctgacctcatttgaacgtgccctttctttggctgaaaatgaagaagaggcagctgatgtctggtacaacttgggacatgtagctgtggtatgttgtcttactgatataatttctgttatagaaagttggtttgagccagacacagtggctcatgcctataattccagcattttgggaggctgaagcaggaggattgcttgagcccaggagtttgagaccaccctgggcaacatagtgggactctgtctctacaaaaaatttaaaaattagctgggtgtggtagtgcacatctgtagtcccagctactctgagggctgaggcaggaagatcacttgggcctagaaggtcaaggctgcagtgagctgtgatcgtagcactgcactccagcctgggtgacaaagtgtgagaccctgtctcaaaacaaacaaaaaagttagtttgaagaaattttcaggaattatcctacatccaggtttggcagtagtcttacggggcaatttagaagtttctgggagtcattgcggctcattttatattcttaggttaaatccacttacgtagaattcacattgacttctataattgtatggtacttgatgctttttgtctggtagcagaagagatacctatgaggaaagaagggaggaggaagtaaacggacccatgggtgtgaacataggctttcttttgtagggaataggagatacaaatttggcccatcagtgcttcaggctggctctggtcaacaacaacaaccacgccgaggcctacaacaacctggctgtgctggagatgcggaagggccacgttgaacaggtcagtgaactggcagcggcatgctgggcagtctgctttcttcagagaaaagctgtcatgtgtggtagcattacagcgtatgttattttaaaatgagctctagaatctgacaggcgtggatttgaatcccagctctgttgtgtattagctgtgtgaccttgggacaagttacttaaccattctgagtccaaaatagaatgtttgattttattaggacaaatctgagcctccccagtctaccctatcttagtgaagtgttctaccagtcaccatcccctgtctactacataactgctcaagccaaaatccttggagccaccccgaaacttctctctttttattgcttccccctgccacacctgcgcccacatcatattcagcaagccctgtcattctgacctcagagtcccatcacattctgagcctggccacctttctccattcccatgacccttcttcagactgctctcatctcttgcatggactactatgagagcctcctagctggtctttttgtttccacttacatcagcaagtcagtgcactctatgatacactcttctcagaacaacctgagagattttttttaaaaccaagactgtttaatactactttgtttaaaatcctctagtgccttctccttcaacttggaataaaatctggacttgaaaccgtgactatggcctttgaggccccacgtgacctgccctctggctcctgctcagaccacatcttttgccactccttcttccccactgacttgcagacacatcgctgccttgctgctctgcagacagacagtgctctgtcttcctttagggcctttggagtgttcttccttcagatcttgcaatgacaaatttctgtcttgtcattcaggtcttagattaaatgccaccttcttagaaaggtcatctcccccatcagtctaaaagagcccttgggtgttatcacatctcttactttttttcttcacagtatttaccactttatcagatattttcatatatatgtgtaggatgtagaatgtcagctgtatgaaaagagtgaccatatctgtcatgtaactgttatattcccagcatcagaaacagtacctgccgtatggtagatgctcagtcaatatttgtggaatgaatggatgatacataaaatagagtgtaacagtagtgatttgaagggattgtttgtgagtgttagatcatgcacttggcatagtggaagcatagtatggagcacatggtagatgcttaataaattgtattattataatgatatatgtaaaagaaaaagtttaaaatactaaatatgttcatacaatgttagcagccatcaagggcaaatattattacattccccactttggagataaagaaacggaggcttgagaagggtgagtaactttacccgaggtcacagacatggcgaacagcatgccagtacattagcctggtcttctaagcacaatgataaacttttaacaacaacaaggaaagaaaggtcattggatgttacctttattgcataaattctcccaaagtaaggaagatagatttgtagtttacagactgttctaaaatggacacttgttttgtcaggaactttgcctgtattcatatggtgaaacaagtgatttttgtgatttttctctgttcccatattggtaattttcttttcctcttacttactgtagtttctctagcatgcaattgacttgaaatgttttggtgaaagatttcataatatgaacttcattttattaaaaattatatctttcattctatattagcttgatatcattttgttttccattaaaaaagttatacaaatttgtcttcagggtcatggatagaagttttagatgtagctacaagttgaggggttgttagcagtttgtaatgttgaatttgtggtcttaatgaatgtataagcatctcatgctgctcagtggtctctgcattgatgatcctatgatcacaaaaaaaaaatgtgaatgttatattttgagtatcttagataacagaaagcttgtcatattcaattgctgtctcactaacaaaactgatcagcactatattaaatacttgctcactgtcatccagcacagaattttgggctttgaaatttacaatggtttttttggttgttattacattaaagaaaaggtaattagagcctgcttagtcaatcaacagcagtaaaaactagattaagtagaatgttgtagtattgagaagattgtatttcagattgtatgtcatattgaaatataacctttatgagaacattggttcccaaataactttaaatgtactctgaattttcagttctcttattttctgtgtcttatgaagcatttattattaacataattttggcaaggtatcagtagttaattgtatttcatgaagtcattgtatttcatgaggaatgttgtcggtatttatcacaggctcgtgttattaaagtcctgtcataggtaaagaattcttttaccaaaaaaaaaacacaaatatggtgctgatatatgttcatacgcctttggtttttcttttctttatttttatacacaggcaagggcactattacaaactgcatcatcattagcaccccatatgtatgaaccgcattttaattttgcaacaatctctgataaggtattctctttcttcattaatttatcatctgatctgttctttttttttctttgttttaaaaaaagtacaaataaatgaggaaattctaacctcatcttcctgaaagaaatgactttttaaaactcttaattactgcatttatttatacatctttacttcaagggacagcatttaaaacttttaatttattgctgaatattgactaaactccattatagattatagaattattttatgttttgaaatatggcatttagtcattgaagaaatactcacttaataactcctggtttgggaaatgtttagttattggcttttacagcaacaaaatcctgtgcattatttgtagatcatattgccaccaagtttctggtacaattgctgtaaaattagtgatattctaatgtgaaaactatcttagctatgaagaatatgggggaaataatactgtgttgcaagtcagttagtatccgaaagctaaagggaaccacgtgccatttttaacaataagaaaacaagaaaaagacatctaataactagcttgtacttggaaggtgagtctgttttgagaataaggaaatggctaaaaatatttgtgatataaattagggtcttgatagaccataagatatttataaagatgttattcttcatagcataaatatgaagtcatctacactgtcatttctgtattgaaaataaaataaactgtcattcatgagttgtaattattgagcacctgtaagtaccagccactgttctaggtgctttaaatactttctctaattctcccaactaccccgccttcctcactcatttttttcatgactgatgttctatttattgagcctttgctatataccaggccctgtttttggcacagaggatgtaatgatgagtaaaagacaaaaacctgtacctcaagcagcttaatttctaatggaacccaaggcttaaagaggttaaaagacttctgcgtcccttggcagtggcagatttcagattcacacccagatcccagtgatgtccatgtgtttcccactgtactgtgctactgcttagttagttaaacccccaagagggctggcttaccttcgggaatagcaccacattttaatagtatataactcaaatgagatatcttctttaagcaaaaggctgcacttccataacagaaagcagtatattaaaaagaagtgctatgatttaaaaaaggaaacttaatttctgttttaatacgtatgtattgttaccagaaatctaccagaatttatctagattttttgagtgtatacatgaaaaagcctcttcctttttagaacgtatccatgaatcaagatatactcaactgtaattaataatttattgtatatcccaaaatagctagaagatttgaaatattcccaacacaaagaaattataaatgtttgaggtgacggataccccagttaccctgatttgatcattataccttgtatgcttgtataaaaatattgcatgtacctcataaatatattattatgtatcaataaaaaggatacattcagacagtatatgtgtttttctttgggaattaatataaagttcattgaaaatcagagacatcctttataaacttttaaaaccagatattttcccaacattattgtgccagcaccacttaaaacctctcaaaacatgttattatgccttaaatacagcagtttttgcttaaattttctgtctaaaaggtaacaactctaatcaaaatatatttttgtttgtggtaccttacagatagttttctctaagttttctgagctatctagagctggctgtttcagcatgtaaatatcactttacgtttataatactatcatcagtgacaggaaaagaaaacataggtttctaaattcattaccagacagctagaaattatttatataattggttattttatctttctcatgtatttttcaagattgaattataatctagaattctaaaatcaaagtagcataattaagcaatttgcctttaagaaccctttgagttatgatgttagttgtgggtttgttaaaaaaaaaagaaaagaaccctttgaatttctacagcatgcagatactatgtcttattttcttttttacttccttactcatttttttctgatctcattccatggtcttattcttgtattttttgcagattggagatctgcagagaagctatgttgctgcgcagaagtctgaagcagcatttccagaccatgtggacacacaacatttaattaaacaattaaggcagcattttgctatgctctgattgttccttagaccacatatgttcttatgaagcagcattatgcaaggggaaaaaagcactatgtctgtgtatgtatgtatatagtgtaatacgtatattttaacaaacctgtccttgatattagttaaggtgacacataagggtgacacagaatgtgtaatgcaaatttcatagtaatagtaactttataaaataatattataaaatacaggatttaaacctttctaaatagatcctgaaactgtctctcacattatatagtagatgtttgtttataatgtttacaaaacattttggtgaatttcctcaatgttttataaatgtacattttttaagtccttaagctgactcttagccatcatgtagcttaaggagtctgaaatctgccattaaaactgcacctttaagccaggtgtggtagcatgtgcctatagtcccagctacttgggaggtggaggtgggaggattataaatagagactttccttaagactttaaaaatgtatttaaaactattttttattaaatactttgtgatttcctattaagctttaaaataaatcattgtgtaaaacaccatcatttcattattttttaatgagtttttattttagtcatctcaggtgaaacaggttttacagaagtccagtaatcttagaaatcatcattattttaattttatttcaaatgatataccaccaattctgttttttcctaaaaagtgatttatgggatgtcacattattaataataagaatattcagattagaaatagagtcacaggccaggagtcccacttctggtcagccacagcacggaagtcagcaatattccagtaccatgcatggcatagcagccttagaaaggctcttgaacttttctctgccttatttagtggaactcttattaaagtgttcacacaaggaaatgtgttaatgggacaggaccactcaaactcatactttggactttgggacctccatgttatttttcatttttttaacttcatgaaaactatttgatagatacttctattcttttcagatttgtataaattgtatactcagctgagagaacaaaaaaattgaattcaaggaatgatagcttgctcaaggctagcattcactacagacaagaaagcaaggccccgcgtcacatccatagctgcagcccaaggtcttgttcctgcaccttagacttgaacctttcttggttctctgtgatgtgttagtgtttatttagcccttgagaatttcctcaggtactatcacatttcctaatatcgtagtcaatatttagattcaaatggtataatgtgaatcattttcttaatttaaaataagagctaataagaatggctgaacatttactgaggatgttaaatatgcccactgttctgagctctttatgggaatgaattcatttcattctcaccgtagtcctatgcaggctgttattccattttacttatgagaatactgaggcatagtaaaaagcttattgaactagtagtaagtgccaaagattcaggtttaggcagcgtggcctcttgagtgtgtgctcttaatcactaggtcaaatcacctctctctgtttctgctgtaaataaatctactaccatttaaaatgaacattgtgtgcattaggaaagttgaataataagggaatattaacacagcaaaaaataaatgattccattttcctaaggtgatatggagggattttgtcttgaatttatgtgaattcagtgtgagcatgaaggcaaagaatgagtcacagtggctcagggcagaatgatgacatagcaccgtggatgactgtatcagaagcgacattcaggatgtctttgtaacaacatttcctatggactgcgtaacttctggcttctgtgccaacatttctgtagaaagaacacaaaaaatactaataattgttttccagttttccactgtggctaaagaggtgctcaatccataaatacaaattgctcaaccaaaattcatatcatcgagcatatttccaactgatgaaaatgagatctggcaagaaggcttcctgcgctaaaacattactgaggttagaagttcttccttttttacaaatgtgtcatggctgagccagtccccatagtgataactcttccattgcatttctgagtgctttttcccaggctcagattatctatcaggatacaatttatggcctacagataagaaaattaataaaggtaacgtgtcactacattattattattattattattattattattattattattattattatgacagtcttgctcggtcgcccaggctgaagtgcagtggcatgatcttggcttactgcaacctctgcctcccgggttcaagcaattttcgtgcctcagcctcccaagcagctgggattacaggcatgcaccaccacacccagctaatttttgtatttttagtagagacagggtttcaccatgttgctcaggctggtctcaaactcctggcctcaagtggtccacccgccatggcctcccaaagtgctaagattacaggtgtgagccactgcacccagcgtctctacacttttagtttccaccaccaaccctttactacaatgagggatttctgtcagggtctttcagctgggattgaatttaagcattcagaaaacaaatattttagaaaggctggcaggactaaaccttagaaaataacccagaaatcaagtgtaggaaaaaaagccatcaccaaataattttgtattctaggaaatagagaaattggaatgttccatgtttatgttccttgcagagttccaaaatggtcatctaggctcagatttgagggggaaacatttatttagcaatttgaaaataactgcactttcatatctatccatatagatggcattcgtcctatttttagctaaataaaaacaacatttttgagagagactattatttcacttctttgatgtcaaagccagtccttgaaatgaaagaatagacatgttgttataatccttgggaactatgtttcttgcaatgtgatccttttctttacctgaatctaattctgactaataagggaaagtggattgttaagtgaaaacaacgggaactcttggtgaaagcaaccgtgttatcttggagaagaggctagacctaaacagattttaggaagaattttgttttctttttaaatcagaaagagagaccctcttccaatatttgaaactcaagtttttatggactccagcaccttgcaactgtcaccgcccccaaaccccacccctcttctggtctaatagcttcaatttatttctctctactggattatgtcttttttaaaaatcacatttcctttaagcctgcctccctttttaaaaatagacaatataactgtttattaaaataaaggaagagaaagaaaataacctgaaaaggaaactcataaaagaaattaaaatggttgataaacatatgtaacaaaaaaaatttgataacagaatgaaattaattcaagagaaagatacatttttaacctcttcagagaacaaagatttgaaatgtttattatatatgaggtgaaggtactgtcaaaattcactgttgggcatatatatcattacaatcttgagagtagtgtggcaaattttattaaattccttccatttctcttgtgtgttttttttttcttccacttttaagttccagggtgtatgtgcaggatgtgcaggtttgttacataggtaaatgtgtgccatggtggtttgctgcacagatcaacccatcacctaggtattaagcccagcatccattagctattcttcctgatgttctccctacctctactgtccccacaacaggccccagtgtgtgttgttccccaccatgtgtccatgtgttctcattgttcagctcccacttataagtgagaacatgtggtgtttggttttctgttcctgcattagtttactgaggataatggcttccagctccatccatgtccctgcaaagtacatgatctctttccattttatggctgcagagtattccatggtgtatacgtaccacattttctttatccagtctatccttgataaaacctgcccccttttctagtaccaccctatctcctttgtcacaggtcttgaaaggctagatgacttttgttacctacttcctcatctttcattcattcctcaacctctttaatctggagtctacttctaccactctagaaactgctttcactgaggtcaccagtagctcccaacccagaggtcgcttttttaacatgacttttttgagatattgttcatgtactatatgactcctcttttttaaaaaaaagtatacccagtggtttttaatatattcacagttaagcaatcatcattacaatcaattttaagacactttcaggttgggtacagtgtctcatgcctgtaatcccaacactttgggaggccaaggcaggagaatcgcttgagcccaggagtttgagaccagcctgggcaacatagtgagaccccatctgatatggtttagctgtgtccccacccaaatctcaaattgtagctcccataagtcccctgtgttttgggagggacctggtgggaggcaatcaaatcatgggggtggttctttcccatgctgttctcatggtagtgaataagtctcatgagatctgatggtttctgcacatgctctctcttgcctgcttccatgtaagacatgactttgctcctcattcaccttctgccatgattgtgaggcctccccagccacatggaagtgtgagtgaattaagcctcttaactttataaattgttcagtctcaggtatgtctttgttagtagtatgagaacaggctaatacaaaaaattaaaaaattggcctggcacagtggtgcatgcctgtggtcccagctactcaggagtctgaggtagaaggatcacttgagctcaggaggtcaaggctacaatgcaatgtttgcaccactgcattccagcatggattacagagcaagatcctgtctcaaaaaatttttttctcatcatcccccaaaggaatctcatacccattaatagtcactttccatagccccacaatcccgtccctatccctgactgtagccctgggcaaccactaatctactttgcttctctataaatatactgtattagtctgttctcacactgctatgaagaaatacccaagacttagtaacttataaagaaaagaggtttaattgacttcagcgtggctgggaaggcctcaggaaacttacaattatggtggaaggcacctcttcacagggcgtcaggagagagaatgagtgccaagcaaaggggacagccccttataaaaccatcagctctcatgagaactcactatcacgagaacagcatgatggaaactgcccccaggattcaatcatttccacctggtcctgcctttgacacaagatgagatttgggtggagacacagccaggccatatcattctgcccctggcccctcccaaatctcatgtcctcatgtttcaaaacataatcatgatctttcaacagtcccccaaagtcttaactcattccagcgtgaacctaaaaatccaagtccaaagtcttacctgagacaaagcaagtctcttccacctgtgagcctgtaaaatcaaaaccaagttagttacttcctagatacaatggaggtacaggcattgggtaaatacacccattgcaagtgagagaaattggccgaaacaaaggggccacagtccccatgtaagtccaaaatccaataaggcaggaattaaaccttaaagctcctaaataatcttttttgactccatgtttcacattcaggtcatgctgatacaagagatgggctcccaaggccttgggcagcagcttcacccctgtggctttgcaggatacagcccccctcccagctgctttcatgggctggcattgagtgtctgtggcttttccaggcacacgatgcaagctggtggatctactattctggggtctggagcatggtggccctcttctcacagctcttctaagcaatgccccagtggggactctgtgtgggggctacaaccccacatttcccttccacactgccctagcagaggttctctatgagggccccttgatgaactcagtataccactggcggctctatgagtaaatagcaaactgttctcatgaaagcaggttgttagcaaactgacaaactgcgtctgctgcccagaaggaatgctgagggcagtcacgcccaaagcacagtgtttcttgtgattaggcacatctgaagcctgttagcaataatgtgaacctgtgatcaatcaagcagctgaccaatcattacttcctcctccctgctctttctacccaataaatatgaagggctgtagaagctcaggacggctgcctttgctcactagaagcagggagctctcttcttcttcccccggccccttcccttaaaacagtttcttttgttttaagttttcatttctgcgtttgtcccccttcattcagccttgtaatgacagtctcaagtaggaacagtaataacggttgtaatgacggtctcaagtagtaacagtagtaatggtcatagtgatgctctcaagtagtaactgttacaagtctgccacacttttccatacatcctctgaaatctaggtggaggttccgaaacctcaatttttgtcttctgcacacctgcaaaccaacaccatgtggaagctgccaaggattggggcttgcaccctctgaagcaatggcctaagctgtaccttggcctcttttagccatggctggagcggctgagacacatcgcaccaagtctggagctacacacagcagagggaccatggacccagcccatggaaccatttttccctcctaggcctccaggtctgtgatgagaggggctgcctcaaagttctctgacatgccctggagatattttccccattgtcttggtgattaatatttggttccttgttacttatgccaatttctgcagcaggcttgaatttctcctcagaatatgggtttttgttttctatcacattgtcaggctgcaaattttctaaacttttatgctctgcctcctcttgaatgctttgctgcttagaaatttcttccaccagataccctaaatcacctctctcaagttcaaagttccacaggtctctagggcaggggtagaatgctgccagcctctttgctaaagcatagcaagagtgacctttgttccagttcccaacaagttcttcatttccatccaagaccaccttagcctggacttcattgtccatatcattatcagcttttaggtcaaagcctttcaacaagtctctaggaagttccaaacattcccacatttttctgtcttcctctgagccctccaaactgttccaacctctgcctgttacccagttgcaaagtctcttccacatttttgggtatctttataggagcactccactgtctgtggtaccaacttactatattagtctattctcacgccgccatgaagaactacctgagactgggtaatttataaagaaaagaggtttaattgactcacagtttcacatggctgaggaggcctcaggaaacttacaatcatggtaggaggaactttatcacagggcatcaggagagaatcagtgctgagtgaagggggaagccccttataaaaccatcaactctcatgggaactcactatcaggagaacagcataggggagactgcccccatgattcaattatctccacctggtcctgcccttgacacgtggatgttattacaattcaaggtgagatttgggtggggacacagagccaaaccatatcatctacctattctggatatttcatataaattgtgtgatatgaggtcttttgggactgacttttctcccttagcataacgttttcatatttcattcacgttgtagcatgtatcaatatttatttcctttttattgacaaataacattacatcatatggatataccacattttatctatccactcattagatgatggatatttagattgtttctactttatggctattattagtattgctcctgtaaacatttacatacaagtttttctgtggatgtgtttttctcttggacagatatctagaagtagaattactgggtcatatggtatctatatacttaaccttttgaggaactgccagagttccgaagtggctgcatcatttttcattcccaccatcagcgtatgagagtttaaatttctccacattctcatgagcatttgttattatctgtcatttggattaaagtaaaagtataggaaaagatatattatactaaaacagaagaaaagctgaatgctatattaatataaggccaagtagagttcaaagcaaacaatattactagaaataaataaaggacatttaacaatgattaagggagtgaattcctcaaaaggacataagaatcctaaatgttcctgtacctaatagcagaacttcaaaatacctgaagaaagaatggatagaaatgcaaggagaaatacacaaatcaacaagttgcccataaaaacatagaaaaagaagaccaaattaatctcaaaataagcataataaaagaaataacaaatattagagtggaaatctatgaaatagaaaagaaatagagaacgttagtgaaatcaaaagctgattctttgaagaaagcaataaagttgataagcctctagttagaatgataaggaaaaaagaacacacaaatttccaatatcaggcatgagagaaatattactccagaattttacaaatattaaaaggctaataaagacatttataaacaactttatggcaatatgttcaacaatttagataaaatggagaaattccttgaaagacacaaactgtcaaagctttttcaagaagaaatgaataacccaaatagtcccatatctattaaagaaattgaatttgtagtcaaaaaccttcccaggcgcagataattttactggttgattctactaaacattcaataaataaataatataaattctacacaaactcttccataaaaattgaaaaaggacaggacaagtacttttcaactcattctataaagccagcattaccctggtaccaaaatccagacacagataatacaaaaaatacaactatagacacaccaatatcccttaagaacacacatttttaaaattattaacaaaaagtcagcaaatcaaatttaagaatgtataaaaaacagtgatacatcctgagcaagtacagtttattctaggaatgcaagaatattttaatatacagtagtcaattaaaataattcactatattaacaagaaagaaaaagtcatatgatcatctcaataaactgagaaaaagcatttgacaaaatttcacacgcatttttgattgaaaaaaataacagcaaactaggaatagaagagaacttcctcaatttggtaaaggcacctacaaatagcctgtagctagctaatgtcgtactcaaaggcgagagactgaaaaagaacacactttcccctataattaagaaaaatgcaaggttgctggctttctctacattaattaatgttgtactggatgttctaaccagtgagataaagcaataaataaataaaatacatttaggctggaaagaaagatacaaaatggcctttattcatagatgacatgattatgtagaaaaatcccatgtagtctacaaaaaatactaggactaaaaagtgagtttagcaaggttgcaggatagagtatcaacatacaaaagtcaattgtatttccacatattcacagtgaagagttggaaactgaaattataaaatcaataccatttacagcaatatgaagaatatgatatacacttggggataaatttgacaaaatatatataagacttctacaaaatattactgaaagaaatttttaaagtcttaaataaatgatgaactgtactatgttaatggattggaagactccatactgttaagatgttattttctcccagattaatctacatattctacacagtcccaatccaaatcctagcttgtttttggtaggcattcacaggctaggtctaaaattaatatagaaatgcaaagatccagtaataatccaaacactgttaaaaaagaagaacaaatttgggactaacactatctaatttcaaggcttattttaaagctagcataatcagtacagtgtgggtttcttctcaacacagacaaatagattgatggaacagatctaaagagtcagaaatagagcctcacatgtgtggaaaactgattcttgacaaaggtgcaaagacaaagggtaattttttcagtgtgatgaaacaattagatatcacacgcaaaaaatcaactttggcttgtagcctgcaccatataaaaaatttaactcgcaatggatgagttaaattttatacttacctataagtataaaacttttagaagaagacataagagaaaatctttgttagtttgggttacacaaagatttcctagttacaccaa

SEQ ID NO: 392 - DNA, 197923 bp, Homo sapiens
gtgatccaccaacctcggcctcccaaagttctgggattacaggtgtgagccaccgtgcctggcctatagctttcaataaaaggtgaatttgcctcttaaaatttgaacagaaagttttaatagtttacaaagtcggtgtcagccagtgaagactaggggcatgaccttcgtatgacttaatgtttttaaaagaaagataaagtttctttgtaaggtattattgtaataatcacatttctttgtaaagtattatattgttcctgagtatctagctactttgctttccagctaggcttctcttgggtattctcttaatcttttatttgtactgggttcttgtgtatatattatagtctgctgtgtgtaatttattataggaaaagggtaagacacatttactttgcggggatgacacaaaaaacctgtaaaaattagagaaacttccagtcatctcacattttctttggaaccgattattcttgtatcttagaactaaaatgacttatactgttttgtttttagaaagggtatccctcctgttgcccaggctggagtgcattggcacagtcatggctcactgcagcctccacctcccaggctcaagtgattctcccacctcagcctcctgagtagttggttactacaggtgcacaccaccatgcctggctaattttttgtattttttgtagagatggggtttcaccatgttgcccaggctggtctgaaactcctgagctcaagtgatctgcccgcctcggcctcccaaagtgctggggttacaggcatgagccaccacatcctatttaaagcttaaataggacttttactatttttaaagtagcatagaaaactgtttgtatcaggcatagtcataattgctctttgatgctgctcctatctgggctgcatgactacatttgtgtgccttgttctcctgtagtgaggacagaatgtgggtcactggaacagtaagtactcatagaactagctgctgctgctattacgactggttgcctgttttgcattttttccgtttaatcatcagactctaaggaagacattattttctctttgtatagatgaggaaacagaattccaaaaagttagctaacatttgcacagagtgtctggctgagcaactaagtggcagagtcagattttaactgacctctggcaagaggactagaggaatacagttgaagtgatacttgctttcatgaacatgaatgtgaaccataatacataatacccatgatgctattttgtggggagtttaaggtgtctcagtccagaaattagcagctgattattgcctgtagctgtaattttacttattcagtgttatttaataaattgccagcattacaatttcgatgaaggcagatttttggcttactgaaacaggataaaaatctggcaacaggggtcccactttgccctgtcatagtaatcgaagctgtgattggatgtggcacagggagtggagtggatgggtgtgcacttgctttccaggctgctgctccccgtctgtcccttattgcatttatcatcttcagcccagtcagtcttgctgttaggggaactgcccagtctctgtaagtgatggcatttgtgaccccattgtaggtaaaaatgttttcccctttttagacattgctggctgagcgcggtggctcatgcctataatcccagcactttgggaggccgaggtgggtggatcgcttaagtcctggagttcaagaccagcctgggcaacgtggggaaaccctgtagccaggcgtggtggcacgtgctacttggtaggggctgaggtgggagtatcacttgagcctgggaggcagaggttgcagtgagccgagattacaccactggcacaccactgtactccatcctgggtgacagagcaggaccctgtcgtaaaaaaaaaaaaaaaaaaaaaaagtaaaagacattgctgagtttcgcacctggacttacagctcagcaggtgggaatccttttgtatttgggccactcatcatcttgctggcgtgtgaggattcacatctccttatcaccttacctgttttcagtttttatttaattttattagttccccacttgacgtccttctctatttttaattcagctatgaattagtattgagaattagaatttttggtgaaaaatttggccgtagttgcagagtcactgtcctctttccttttcacagtgagaactgttgtcttcttcctggcaaccttttataggattctatggccagtgttaatcccataatttgagctcacttattttatatgactgtacatttaacagaagattctaagacaggtttgagggaaatatgttaaaggtgctgtgtactgaattgatcataatgaatgaaatacttttatttcctttccctttgtagctgagatgagtgaactgagtgtggcacagaaaccagaaaaacttttggagcgctgcaagtactggcctgcttgtaaaaatggggatgagtgtgcctaccatcaccccatctcaccctgcaagtgagtaccatccccccatctcaccctgcaagtgagtaccatccccccatctcaccctgcaagtaccatcccccatctcacctggcaagtaccatcccatctcacccagcaagtaccatcccccacatctcaaccctcaagtgagtaccatcccatctcaccctgcaagtaccatcccatttcaccctgcaagtaccatcccccatctcaccctgcaagtaccatctccccatctcaccctgtaactaccatcccatctcaccctgcaagtgagtaccatccctgcatttcaccctgcaagtaccatctcatctcaccctgcaagtaccaccccctcatctcaccctgcaagtatcatcccccatctagccctgtaagtgcgagtaccatcccccatcttaccctgcaagtaccatcacccacttcaccctgcaagtaccatcccccacctcagcctgcaagtaccatcccccacctcagcctgcaagtaccatcccctatctcaccctgcaagtaccatccccatctcaccctgcaagtatcatcccccacctcaccctgcaagtaccatcccccatctcaccctgcaattgagtaccatcccccatctcaccctgcaagtaccatcccccatctcaccctgcaagtgagtaccatcccccatctcaccttgcaagtaccatcccccatctcaccctgcaagtaccatcccccatctcaccctgcaagtatcatctcaccctgcaagtgagtaccatccccccatctcatcctgcaagtaccatcccccatctcaccctgcaagtaccatcccccatctcaccctgcaagtaccatcccccatcttaccctgcaagtgaataccatccccatctcaccctgcaagtgaataccatccccatctcaccctgcaagtgaataccatcccccatctcaccctgcaagtgaataccatccccatctcatcctgcaagtgaataccatccccatctcaccctgcaagtcatagccagctgattttggctttcagtttagtgtctgtatcttacaccttattttgtttttgtttttctgtggacaagtttttagttttataactaaatggagtgacaattaccatggccctctccagagtagcgtatttcttgttcatgtatgtttgttgagaggcaagggtgggggggctttgtttgtgcctcggacctgtgagatactgaaatacctggggttccttaagaattctgtacgtttaagcagatgggtatatggtaactgccccagtttgtatgcattttggccacacgcagtatacacagattttgaggagttgagggaaaagttagttatgggtaatgaaaacattttggacttgggttaaatttttccttacaagctggctggctcaatgtaatgagctttatgagatggctttttggggcttcttttttttgccgggggtaggtcctatggatggaatcttcatttttaattcttttaaggaaatgatgtgggaataatacagctgtacatataaggagagtatgggatgagtctttttgtatcacaaagccttgcatagaggatgtgtttattgtattaatgagttcactgcataaaatatataccttttttattaagtggtgtgatttttatcacaaaagcttgtctttcttggtggcttggcttgagttaaaagcctgtgtttgtgttatcccaagctttggaataaatgattgtgtcctattttgatatatggtcttattttaaaatattctttttgttgctgttttttttgcatttctcaaaacaagtagtgatggggagtgtaaagagcccttatacacagaactaataatgcattgagaagattgaatatgaaatatgctttttttttgttttgtagagccttccccaattgtaaatttgctgaaaaatgtttgtttgttcacccaaattgtaaatatgatgcaaagtgtactaaaccagattgtcccttcactcatgtgagtagaagaattccagtactgtctccaaaaccaggtgagtgagtgactgtgctactacatttgggtaaaaaatataaaatggcattttgtgactgtaaatggaattgaacaaacaaaagatggtttcagaaataattttggcaggatcagttaatccaaccagtctttaaagagcaagtgtgcctatctgtagtattccgaagtattttgactagtgaatatataaaccttaccattctaatttaaaaatggttttcactttcaaaaaaaacatcagtagactgcattaaaaatgggttttccaaacagattggagatcagtcctggtttttattttgttagcagttgcaccaccagcaccaccttccagtagtcagctctgccgttacttccctgcttgtaagaagatggaatgtcccttctatcatccaaaagtaagaacttctattttctcaaatcaatttagtgacaacatctcaatttcctcatttaacttcttttttgtcagagttactacattggtgcaaaagtaattgcgatttttgccagtaaaactattaagttgttcctcgtcactgaacctccatctggccccttaggccaagtggtctgaaactgttcaatgttagtatcccaagcactcagtggggggaagcatatctttgctagtcacattttccattattccctgcatttaagtatatggatgggttttagcgggggctggggggcagtttgaacctaatgtcagaactgagatgaagaaatccagtaggtactgcttaaaaccatccaaacttgtactgatgatggttgatgaatctccagatgtttagttggtcaaaatgaattatctccttcttgccccggtagcttgaggaccatatgaaggccttcacttgcccccatctgtaactgggcgtagatgagggtactcagtgaagagtgtaagggataattagaagtttttgtggtatgctaaactaccttttgaaattgtacttgctgtgattctttgactagaattttgtgtctcaaggttaagtccatttttcaaggcttcactagtattaaaatggtccttatagatggaatctcttactctgttaatggttagggtgggctggttattgtctcctaagttgtatgttggccaggtgaggtgggtcaggcctgctatcctagtactttgggaggtagaggcagaagtggaaggatcgtttgagcccgggagtttgaaaccagcctaggcaacatttaagagaccccatctcttaaaaaaaaaaaaaacaggcttggtagcacacgcctgtagtcccagctactcgggagactgaggcaagaggtcatgccacttcactccagcctgggtgacagagtgagaccctgtctcaaataataaaataatgtgtttacttatattagccttgtggatattgttgaagctctgttatctctattcagcattgtaggtttaacactcaatgtacaagaccggactgcacattctaccatcccaccattaatgtcccaccacgacatgccttgaaatggattcgacctcaaaccaggtaaacattcaaattcgtttttctcatgtcagttcaaattcttttttctaatttgcagtttctaaatttataagcacacaaaattggaaactagactgttactttgaatttttttctttgctgtttaattatagaaggctcctttggcaaaataatttactacatgggctaaattttacattatccagtggttacttttttaacctagattatcttgctctgttgcccaggttggagtgcagtcacactatcatagctcactgcagcctcaaacccctgggttcaatccatcctcccacctgtagctgagactacaagcgtgtgcctctatacctggctaattttttttattttaagtagagatggggtcttgaactcctgagctgaagcgatatccttccaccgtggccttccaaagtaccaggattacaggcatgagccaccacacccagccagattttaacttctcattatatactacgcaaacatatactaaggccagcaggagtatatatatgtgtactgtacttgaatttcacatccattttcttcgacattagcaactgggagatactgaaaggaagtttcaaaatattttagtgtggccagaaaatttaattacatatggtattatcttttatctacctgacataattgaattatttttaaaaatctgccatttatattgtaatcttatgaccaaatatttattgcttaaaactagtcaactttttaaactgagatatatggtatatatggatacaaagcagataattaaaacaatttttggttctgttcattcagcgaatagcacccagtcctgcctggcagaagatcatgcagtttggaagttttcatgtactgatgaaagatactctacagaacttgtcaaatctttgaaacttggaatatattgctttcataatatgaagttttattgcctatctatctgaagtgtctaatttttcaagtttgtaagtttattatgtggttttaacattgggtgtttttgttttgtttttactatgaaaagacagcttaaggaagagctaaattctgttaaaatatttggggcatgtttgtgcactgctgttgtgaggatcagcatatgaaattgacatcatggttagtcatggtactgcagcttagggggctacacggttgctgtgtgagtggagagatgcagtgaggcagttgtcattattctaaaaattgtactactttcacttttcccaaagattatataatgttcataatccaccatgaaaacagcattggccaaaggtactgaggctgcttaaaatattcaattctgctttttaatttttaagtgaatttagtttgaaaagcatgattatacaggcctctcaggctgagtgctactttggtaaagttcccagttttcctgccttctgtgacaggatgaatgaggtgggtatggacagtggaggcagctggaatggcaagtgcagaaaataggaacagttctatacagtgctctcatttactaataacataatgccttctaaataatttttttgggaaactacattatcacaaaattatacaaatttttttacaagtatttacatactgtatctgaaaacagactttaaagtcacaagattataaatgtacatatatattctcacattctgaaaaataacattctcagaatccacagaaaatatacttagttactactgaagataatttttgaaatgtaaaaattagatttaaatagtatattttaaatgacagaactataattacagagatcagatcagataggtaaactgcaagatagataggatgaaacttttggcctactgtattacttacagagtttttttgtgtgtggtttttaaaactgttaaggcaagaagtgtcaaatgctttagagttaaataacagatcactgatttcaaagacttggtgtatagtgttaaaaattaaagcttaaaaggtggttagaaaagtggattaatgcaaaaggggtaataaagactgcaacattctcaggaccaaattaaactgctaaaaaaaaaaaaaaagttcattgacttgcttagtcgtatactcaaatgatgataaacctacatgtgcaaaggctcacgtttaagattgtcaagccagcagtctactgttgtgttgccattgcttttccattgggagaagaaagaattaaccagtcattaaaccatttggtaagttgcactttgctgtgctgatcccacaggaaaggcttgaaacacgagaagcagcaaagacagagcacacaagtgcataaggctgttgtcttcggcttgggtgaaatgacagttcctcttcattctaaaggtttactccattgaatttaaggcatttgttcattccagtgttgagatgctttgcatctctgcagaagaaatttattttaaattgtttaaatatctggaaatacttttagctatcatttataaagatagttttgttctcagtttcactataaattatagaacaaatgggaaacaagggtttaatttagttcagccattttacaaggaaataataaaatactaaaatctgattgttttttgctatttaatagccactgcccagacacatatttaagagtttaatctttcagttgctatggcttatgaacaagctaaggttgaccataaaacatttgttggatgacgtggtttaaaatgatcaccacaaaaagggaccacaaaaaaaggaaggaaatgagcatggttggcgattggaagcaagggtaccagagggcacagtgtgctttggcatgcattttatacataaaatgaatggaacaaaaggtgccagaagtcccaggttacacaatcaggagcttagatactgcacacaaaaataattatctgggttaaaaaagtaaacatagggcagattctatatggcctatcatgtttcttcaccttcccctcgttgctggctgatacagcgaggtggtcagctgatgactacttagtcaatatgacctttagtcgtgaaactgacagcagcagtgattaaggctgacttaatcaggttggccactttgaaggacagaaatgcagtggaaacagttttattctatgtagtttacatgcttaaggttacagagtttctacctgcactgtaatggaaatataatttctctgtagccaaaagctggcaaacttgacccagagggaaaatttaaaactgcagcaggctcaaatgtagagtatttttctttttatgggcaggttgttcagggatttttttcctcctttaatttattgactgactgtaaatacatgagtagaaacttaatagtcatgtatttcaaaatttggcttaatttaggagaatccactgatgaacaagtaccaacttacgtttcaagcttcttagccccataatcagtccttcagccacagctatttagagctttaaaactaccaggttcaatcactggttatgctttctgtgatgtaatttagtcatttctatttttagtattaaccaagtattagacacagaaaataggtattaagaatcttcatatatcctgtcagaccaaatgggattccaggaacctaaagcgatctattatgctataaagataattaacacattaaaaactcatagggtcaatacagcatcttaaacctcacacttagaaaaatatatttttaaatagcagtctacataattttcaatcttcaggaaactacagataggctagacagcgaattcctgaatgatgagtagtgatctttggcagcatttaaagtgaaaagaaataaggatctaagaattcagccctaatccactaaaaaaaggaattctaactgacaagtttttacaaatggagttgggctcattcattttggaaataaacctatggagtggcacacatctaaacaaattttcccaatagaaaaaaggctataaaaattttattccaagagtgattaaattgtataatgttgtatatgtgaatttaacacttttgtttacatgttaaacaaatgtgtatatattagactacattaaatatgcaattctttcttccagttaaatactgttgctccctaaaacccttacattgtacaccattgggaatgattgttcatcatactacttttccattagtgaggctacagttatgttttaaatgtgcgattacagagatggcatctgaacataaactgatggctcgaaaatgaaaatggaaatgtagcagccatatactgctaactttggatctgttcctgaattcaaaactactaggagaaaagtgtcctttataaaaaaggaccttattaatgcctaaaaaacatcatattctctaggaaagcttgtgtctgtttccttagggaaaatgtttgccttttaaaaactgtgatcctttaggatgatcatgactttccctttccttatggaaatgcaagaataaaatatttcattaaacaatgaaccttgaaaataaaatataaacattaagaaaccattttgctaaaaagataatgaaaattatccaaattgggtttttgagttcttctgtaaagagtgctctaccctaaattttcccagcaggtctgccgaaatcacacacttcccaatacagggggacttggcctttaccatcaagtattcgatccttccttgaaatggcattatctggcagtgtatggattacggattatacccagtgcatatagcaaatattttgaacagatcagtctttcactattttgatgattctgggcatttctccctgttacagtcttgggttagcaccacttgaccatgcagggttgggttttggtttttcttctctgtaattctggtctcaaagttaatttctgtagtcatctcagcatctctcagtgaggtgtatgtacacatttccagacaaataagctgcaatcagagaagaaaattgcagggagttaattatgtttttagattttcataacagtttaatatttttcagttgtgctttcaggttacatgtgtaatatttttcctctttaactccttttattctgtatttgcataaatatgagattctgaagagccatctggttatactaccttctactaatgttgactagctgatttcataaaccaaagctgtaggagttgttgtattaagtctcttaactagtaacatagtctgctcttcatgggctgagaaagttactaacctgcagtcatcacctccagcactaacaacatgtcgatcaccactggtaaatcgaatatttgtcacatggggcgaatgacccaagaaccttttgtgttttgcctaaaaaacaatgacagacaagctcagggcatttggtgcacacagaagtcaaaggctcttattaggaactataatctctatgacaagagctgtggagagagtagggagttagcaccgcagccagtgattagaatgcttttcagcatgagtagtggatctgcaaaaccaggctgtgtgggcagtcagatgtctccaggtactctgaccatttttctctaaggaaaagcatttgaaatttgataactgattataggtttggtgaaaagctaattacagcttttgtaggatggttccaaagatggtattactcgagggagaggatttgtttctaatagcttttatttcaaagtaaatagatttagaaagtttggggaaaaatttagaaattaggacaaaacattttaaatatatggggaaaagtgctgatgataagacatcaaaattaggagtaaactgataatagtaaacaaaacacaaacttacaaatttttctggacatgggaagtcaaataacttaaccatgccaaagtcatctcctgtaacaagactgattcctgaatgagatacacaggcacagttgacatcagctttctcagcatgtctggaccagattcccaaaacctcatctcctagaatactagagggaaggaacaaaagaaaactcatcatggcaagtgcgggcaggttgactatattcaaaaagtttcttggcaattaatctctaagtaccctatcatgttacttaaaatacaggaagtaaattatggtaagttgtttggagacctgaatttcatcaggatatcaactcctgccttttaaaaatgacattttataatttgaagggtttctagattaatctttttaagattaaagtagtactttatgaaaactgatagaactattttttctttttttttttttgagacggagttttcgctcttgttacccaggctggagtgcaatggcatgatctcggctcaccgcaacctctgcctcctgggttcaagcaattctcctgcctcagcctcccgagtagctgggatcacaggcatgcgctaacatgcccggcttattttgtatttttagtagagacagggtttctccatgttggtcaggctagtctcgaactcccgacctcaggtgatcacccccgctcggcctcccaaagtgctgggattacaggctgagccaccgcgcctgactgaaaactgatagaactatttttcaaattaaaagtgctacttggctgggtccagcagcacataccagtaatcccaacattttgggaggctgaggcaggaggactgcttgaggccaagagtttgagaccagcctgggcaatattgtgagatccctatctctacaaaaataaaaatgacttatgacataggaattaaaaaaatttcagagatggggtcttgctatgttgcccaggctggtatcaaaacttctaggctcaagtgatcctcccacctcggcctgctacatcagagattacaggcatgagccactatatgcctggctgatacaggaatttgatggcatttttcattggccaaaaaaatggatagtcatggttacctgtcatacagccaggaaatttgaacaaatttggaagctttgacttctaatagattcaagatagcattcctttagatagagaattaataacagttgcttaacagcacccaatacctttttgccagtcattaaatttagcattaagaaaaatatcagggtatctttaaagttaaaactttgatttccttaaaaaaaaaacttgataaatcatggaaactgataaaacatggaaatatattcaataaaaaggggtcccaacatgaacataccatttcaaaatatggtaacaaaaacttgaaactcaattactattccttattggaatggctctaacagttcagaaataggattttctaactggccttcaaagtcagttcttgccttgtgaatatataagtatttacctagtccatgtagcccaagtaattctgtcaatagcggcatgatccataagatgttttcctgaaggcacttcatagacatgccgtttatagcagccactagagacctttttcatcagattaaaatgggacaagaattccattaggtgagagacaaaatccacagggggtttacagaatactagcatattgctacttgatttacatgtctaacattattaagtatgcaaaagatcactacaaaaacttaataggagaaaagctctgataagtgggggaggaaaggggagctgtaggtcagaaggtacaaagggaggagttgagaagctggagctctggagctcaggaactttaaatgcattcactaacacgaaatgtaaaagcagaagaacttgccacctgggtatacagtattggtactgtacctggagataactgctatctgcagagaagtccatttgaatgacaaagcttggaatgtctttgcagtagctgattctgttaagagtggggcccagcgttaggtcataaaaatccactgagttctcactagaacctactgccagataccgggaatccggactaaatctgaatcaaaacaaaacgtaaaaagtattagaccacatgaagtattataaatacttaagatcagtgacttttcctttctagttcttaaaagtaacgtgtgataaggcctcaaatagatttacctgtcagacacaactgatcatgtatactgagattgtctgggttacatgaaataaggaagctttatattttacttaaattttaaatatttccccaattgtcatctcccaattcctttaaaaacgtctaatggcttaaaaaaactttcttaggccaggcccagtggctcacacctataatcccagaactttgggaagcggaggcgggcagatcacctgaggtcgagagtttgagaccagcctgaccaacatagagaaaccctgtctctactaaaaatacaaaattagccaggcatggtggtgcacgcctgtaatcccatctactcgggaggctgaagcaggagaatcgcttgaacccaggaggcacaggttgtggtgagctgagattgcaccattgcacttcagcatgggcaacaagagcaaaactccaactcaaaacaaaacaaaacaaaatttaattttttaaatagaggcggggtctcactatggtcccaaactcctggcctcaagcaatccttcccccttggcctcccaaggtactgggattacaggtgtgagccacaacacccagtcagaacatctcagcttttaaaagccattagcattacataattaataagctaacaattcattaagatagttttcttccatctggaaaaaacgttgtcttaatattaagcaaagaacacagcccagcttaactaacctccagttattaaggtgaaatgacacaacttgaatcttggaagaagaattttttttttttgagacgaagtctcgctcttgtctcccaggctggagtgcgatggcgcaacctccgcctcccgggttcaagcgattctcctgtttcagccccctgagtagctgggattacaggcgcctgccaccacgcccggctgatttttgtatttttagttgagatggggtttcactatgttggccaggctggtcgagtactcctgacttcaggtgatctgcctgcctcggcctcccaaagtgctgggattacaggcatgagccaccgcgcccggcctgaagaacttatttaaaagacaaagtgaaatgctatttgcctagcaatctttggagtcatatgggacaattcagtctcttgaaatggcccatgagtcttactgaggtacgatagagacatgtaaaagctaagggaagccactgttactattttatatattgaagttctgaggaaggtttcatttgtaaaaggattttactgatgaaaagtgtacaagcttttgacagacctagattcaataatcttatctactgatcacacggaagtactccgtaaatggtagccactgttgaaaaatgcttaagcactgaaaaacaaaggtttaagaaacatttaaattaatttggattctggaacatttaatcaataggtattgattaaattaatgaactacatattcccaaactgaggttactaagagaagatatgtttgaaatcacaactttagttttccagggtgacaacttttgaagggcagatagctctcttgtattacagtgggagatacctcttggtgggatgaacttaatggacatggctaagtgttaacatgaattcatcaaacattacctactagtacttgctattatagttggtgcccagtgggtttataatttagcaagaagaattaagtagtatacaaacagccatattttagcatacaatttataatacgggaaatgctacaggccctggggacctctttttgaaggcaaggctatggaaaattttacaaatggaagttaaatcaagtatatactagaaactctattccatttgttcactaacctgatatcatggattgcacatctcctgtctctcttctttccccatatttttagagaactcactagtaaaatgataaattctccatttttcattccaatagccaccatgtccccttcagggctgtaacacacagtacgagcagcatgtcccaaattcactttgtttaacatcttctgcatttaaaaaaaaaaaaaaaaagagtcataggaaacattaagtgaagtacttctaaattataccagtttcccctcaaaatgctcaacagaattctggcagttctttaagtactagcaatttagaacttccaacttttctttttagaagttgtaacctcttttaaaaaaattatctgtacttactttatcagcaatatcccaaagtctcactgtcccatcttctgcagcagaaaggaaaaaatccctggaaggatgtgttgctagtccccagattggcccatccacatgaccgttaactaaaatattacaagctgcatttttctctccaacttcgattatttcagcattccttgtcccaacaaggatcttgccctgaaacacaagcaggaccaatacagtgaatgtaatacaacagctgcttttcttcttcataatataaaaatgaccctattgacctgctttcagagaactttttgctttgagctaatctagtagcaaggcagtcattagctcatgcaaatttttctatgactacaggcacacatctatctgtaagcacaatgggctagattacatattagagtccatgctacagaatagaacttttctgtggcagtacacctggattcttcaataatcaaagtttttatttgataatcttaggatttccaaactggggtcagtgcagtgggatataggaaaaaataatagaatttattttttagttaaaaagtaaaagcttaactacaatttaatatgcaggctgaagataatatccgtatgatttataaatacacttaataagtacaaacacgctcaaaaattttcataggagttgtagttttgaatttttattttgaaattgacacataattatacatatctatagggcatagggtaatacgcataaccatcacctcagacatttatcatttctttgtgatggaaactttcaaaatcctctcttgtaaatacctgaaaatacataaatacgtgattcttaactatagtcatcctacagtactacagaatactaaaacatactattcctatctggctgtgtaaacttgtatcctttaaccagtccttccctatccccctccccctcccccttgtccgcctccagtaaccactattctactctccacctctgtgggatcaacttttttagtttctgcacaggagtgagaacatgtatttatctttctgtgcctggcttatttcacttcacatcatgtcctccagtctcatccatgttgccaccaagaatgacagaatttcattattttttatggctgagtagtatttcattgtttgtttactgcacgttttatctagggaatgtgtgtttttttaaaaaatggagacagctgtcctaatatgagtcaactgccaagggctttcaattatgtctactagagttgttaaattggcagattctagaaaatattggaggtttacatacagtatttagacagaatagcttcctagcttatgcaccacactggtgctaactttggcaaagaaagcagcaaagacagagtaatgttggcaagcaaatccatcgttatgcattattaagtattgttcattaggctgcaaagggtgagggaatcacagtaataaccactttctgttttctgctgcactgtatcagctcatggaacatcttactttgcctctgcacacagaacgaacacaatctgtggcttgtcctgtctcaagcctgaaggcacggcaccgcctcagttcctgatcccacagtttaaccgctcctccttcttttgacctaagtaaataaccaagccagagtaagtgttcattattggctactataatttttattataaacaaataccaagttataagcagaatcttttttttttaaaaaggccctgatatttataatttacctctaatattcttgtaaactttctatggcaatttgaggatatactatatctcagtcaaaataaacatccagtttcagtgaattttattttgagaaatactctttttttctgacatgagcataattttatttagcctctacaatacattacaatacattatcctctctcataatacttttttttttttttttaagatgtagtctcgctctgtctcccaggcttgagtgcagtggcatgatctaggcttattgcaacctctgcctcccaggttcaagcgattctcctacctcagcctcccgagtagctagcattacaggtgtgcaccaccacacccagctaatttctgtatttttagtagagatggggtttcaccatgttggccaggctggtctcaaataccttgacctcaggtgatctgcctgcctcggcctcccaaagtgctgggattccaggtatgagccactgtgcctggcctcataatacttcttgattaggaagatgtaaaaaaacaattttattaaaaggataatggaaatgtaaggcaaaataatagaattacaaatgctatgctacagagttgatttatttatttttttgagacagagtgtcgctctgtcacctggcctggagtgcagtggtgtgatctcggctcactgcaacctgtgcctcccaggttcaagcgattcttctccttcagcctcccaagtagctgggattacaggcaccatgcctggctaatttttgtatttttagtagagatggagtttcaccatattggccaggctgatcccaaactcctgacctcgtgatccgcccacctcggcctcccaaagtgttgggattacaggcgtgagccactgcaactggcccagagcttatttttgaaggccaaaacagaagcatatttattccctatcaggtgttaaaatatctcactggaacagtttagcaggcttctagtgagtgggggtgtgcaggagtaaatgacgtgggaaatacaagtgttggaggacgaaatagagcccatttatggattttattcctggaagggctgaaaaatgtattccttccttttctgctagatgaattgcttgtctgaaagcatgcctatgtgcattcttcctttatgtaaaaggcacaaattctgcgcttgtgtttaattaacatatgtgggttctttcaatcctgtattgaaatgtacttcttagtcaactatatgtcacatttttttttgtttttgtttttgttttttaaatggggtctcactctgtcacccaggctggagtgcagtggcaccatcacagctcactaaagccttgacctccccaggctcaagtgatcctcccacctcagcctcctgagtagcagggactacaggcatgtgccaccacacccggctaattgttgttttttatagcgatggggtttcaccatgttgcccaggctggtcttgaactcctgggctcaagcgatccacctgcctcagcctcccaaagtgataagattacaggtgtgagccactgtgcctggcctacatgtcatgtttcaacatgcatatgactatgttggtgacaaatcaaatcataagtatctggttactgttgggagatttgaaaatcactcagaagagacctcttctcaaattttgaggtcttgtataaaacagtttaaatttgcctcaagcaaaaggaaacaaggcagttctctctagttccctcatccttttctaaagcaacaatgtgcattctactccttagaatccattctgaacaaaaagagagcaggcagtcaaaatacaaccctggctccagattcccccatgggcctcctactcagcaaatcatacacaggcatacagacattaagaaaagtaactcaacttgtaggacaactacctatccacacctcagaaaaagtatcaccccaacatgaaaaaaattggaagtgaattaagaccagaaatgagaatcaaatagaaggcacataaaaggtaataaaggagaagcatatgaggaggaaggtcggagaggacactctgtgtagcctagaaacaactagaataattaactgcaaacctcaggtaggtcacaaatgcataaatattctgtgaaaagaaagaggactcacggcctttcctttcccccagtcacgataagtccatctcgcagggtggtgtacatggcaaacacaggcccgttgtgagctctcgccacgattctacacaatatgtgatctttccacacacagacatcaccactgatggtacctgtaaacgtcaagttattctgaaaaggagtgggggagggggagacaaactcatcaaaagttcaaatagagtttaaatagataattttctatgtatgtgtaatgctgtctcacccttgatacaaagagcatgcatcgtgtagtggcagcagcactgaattcacgagtcaggaaacctgaacgggaggcttagctttgtcaggaccttttcctttccaagtctgttgcttattagctagaataaccttagacaattcttcccttccaattctaacatactataattctagggtttattttttatttttttgagacggagtttcgctctttgttgcccaggctggagtgcaatggtgcgatctcagctcaccacaacctctgcttcccaggttcaagtgattctcctgtctcagcctcccaagtagctgggattacaagcgccagccaccacgcccggctaatttttgtatttttagtagagacagagtttcaccttgttagccaggctggtcttgaactcctgacttcaggtgatcttcccgccttggcctccctaagtgctgggattataggtgtgagccactgtgcccggcctgagccacggtgcctggcctggtcttatattaagaatacccaaaatgttcaactgaaatttgacatggcacaaacatttcaatagtctttttctcaaaaatgtaagtgtacttaaatattctaaaattataacttttcctataagtattgcataatcacaaaaacaaaaaatgcacttagtttttcgatgcaccaaaggatttatacagcctagccaatgcaggatattaaaggaaagagatgtggattggaagccacaggtccagatgagatggaataaagtgagaggagagcaggtctcctgaacacccttctgtcagggccaggaattgtgctatttccttctgtctcactacctccttcttccctcgaagtagagacactggcccagagcacttccagctgtatgataagcagtgtgttaaatgataaaaagcaaaggaaatcctaaaccctagtaccaccttaaatcatttgaaaatcatgtttcttgatttacctttctctctgacaaatttttaggactatgaagaactactaggaagacagaaattttaggatatttagggtgacaattagaagattaaggaaggcttttgagtataacagtagtccaaggaatcaaatgttcatcagaatccttattatggtggctcatgcctgtaaacccagcactttgggaggtcaagatgggaggatcacatagcttaggagcttgagaccacctaggcaacatagcgaaaccctgtctctactaaaaatgaaagaaaaattagcctagcatggtggttcctgccctgtagtcccagctactaaggaggctgaggatcacttgaacctgggagatggaggctacagtgagctataatcgcaccattgcaccccagcccaggcgacagagtgagatactgtgtcaaaaaaaaaaaaaaatccttttccccctctcattaacattcttttcactccctaatttctgaaagaactagatttttgaaagatgaaatatatgcttgaccagggcatgtaatgattagcagatcacagtatcatctcaacaacattcatgtggctgatgatctaaggcaagagaatgtaaagtagtcaaagtcacactatgtgcattttaagagacatactgcaccaaatgcaatagcgagcatggtctgcatccgggcatcttccagtgtgctcagtagcccttttttgctaagaagagctcttcctgccagggtccagaacttcacatgttttactcccactgagacaaactgggtatctgaatctggtcggaattctgccacaaaaatacgttgattgtgaccagctctgctggcaattttggcacctgacaagatacaacaaaattatctaggttattacaagaaccaagctaatcaacagcatcaaacaaatatgtaaaatacatagttcaaaaaacaaaggcttagaagagaggccaatggcccctgctctactacctagcaatacatgatttacaattatttgtgtattgagtccttttcacttatcttcgctccattaacttttctttatataacgtaaatgttttgtctaaagtgtggtaggtaatattatcctgctgatctgccattatcattagaaatatacataattttcataagaatctccaaaaccaatcaaatcattaataataaatacatagtttcttgctggaagaaaatagcagtgaatcatttataatgctaataatggtttcattaatttatctgttttgtgaggttacagttccactgggcttttaaagtgaaatatacctacagtaccactgtgtacagtatattgcataggcctccactgaatgattgtttcaaccaccaactttaagacaaatattaaatacagaattcctactacctttgtattcttgtttttttaaaaatcaaacacacaaaagaatcctaccttcctgccatctccaaatggtaatagtatgttctgggtctagtcccacagacagcaatagtttgccagtagcactgaagctgactgaacatactccctttgaatggtagcatcttaggatagataaagtctgcttgttcattgcatcccagatgtgaatagaaggagctgtagctaaataaagatagtatcaaaaagttgtaatctacctgttataaatatttctgtttctaaagcttatgcatattcatctgtgaaacatggacaaatgtgtaccaaacaaaaactgtacttaacaaagaacagctcaaaactaaggctaaatttaagaaaggaaaaggagttttgggggtggggaggaaagaaaaggaaaatatatagaacacttcttcaggccatattccaaattgcacttttggaaaaacagcatttagacaagcaaatcaggcaatctcaactttaaacaattcaaaacaaatgcatgttttatgtatacttttaatctttatacaattatatggagaactatacaaatattaaacaataaatattaaacaccaagtatacattcagtactgatgttatctgaaagagaagtgaaaagcagacacaaatagacaaaggcagtagataggaaaccacctgaatagatctcaaaagaaattttcaaccatacagatagacatctggtaaaaagctaagttcatatcactttataagacatttacttaaaaaggatttcatgagaaagataaaactgctaatctttaaaaaaatgtggttattattaatcttgtgtagcttgtttctgctgcttaaaaaattatcccagttctccatattttctaaattaaaaaaattatagttttatattttcttttttatgaactgcaccctataaaaatggataggtcaattcagcagttaattcaatctcagaacataagtacttttaatgaagcaataaaaatactaaagtgcatttgcttcaaattataaatgttataaatgttttaaaaatagagaaacattaagacaagctgccttaaatcattcaatgcagaaataaatgttggtctctaaagaaaatattctgataagtttagattatattttataccatctgctatttgtaatacacaatgataaattaaatctggcagttcttcaaagcagttaaaatatattaaaccagagacttagagtatcattaagtagaaattgttcaaagatttatgcaactgtaaaatatcaaaactacacggaaacatacataaaagtttatcatataataaaataggttatttatgtttgtaaaatttatgacaataatgtcagtattgaactaaaattaatatattattcattcattaaaagtcaaagtaccccaaggcataggtaaacttaacctcaataaagaatgttaggtggcttaaatttaaaatgtaaatatataccagatcactctatacattttgccagtgataaatattatataaatatttttatatgtttacaaaatgcacctctaggcaattcacatgttatatttgccaaatcatgatgaggtagacaatagattttcaagaaatatcactaactttgcctccaaatttaatatgccacaagttttaaagttttatttatctaaatttaaatagcaagtaatcttaaattcaatgactgagcttctcatatttttataaaaaattaaaggagatggcaagaaggtgaaaccagaatttatgttttaaaacgtataggtacgtaaggtaatggaattgtcacacacttagactgttctaaacttacatcagtaacagtatttaaaactaaaattactgcaaattttcaggacctctcgaagttactaaagatgaaactatgtttattaagtatattatattttctcctatcatttggaaatggtcattcctgatgcttgggtaacacataaacaattcttcctccacctgttccaggaggccatgaggtattaagtacctatcatggcaggcatgttactggggacatcgcatattttctaatgcttaccttctaggtaggtacgttttttcctgaattcagcctcagagaagataactgacttgccctaatacaactcagagctgggagaggcagcacaggtatgctgttctcagtatccaggttccactcttgctcttttccccacatgtagctccctccagaaaatcaatcccagtaacttttcactaccgtttttcactcttagtttccagtatagagatgccataagtgtctctttaaatttttaattgggtcttacaagaatcaaagttttaaaggatattctttatcccctagtttgcctttgatgcagtataataaaaactgtattttttttttttttttttttttttgagatggagtttcgctcttgttgcccaggctggagtgcaatggcatgatctcggctcactgcaacctctgcctctggggttcaagtgattatcctgcctcagcctccagagtagctgggattacaggcacctgccaccatgcctagctaattctgtatttttagtagagatggggtttctccatgttggtcaggctggtcttgaactcccggcctcaggtgatctgcctgccttggcctcccaaagtgctaggattacaggcatgagccaccatgcctggcctaataaaaactttattttaaaagaaaattttaacatgggtcattaggtatgccaagtgtattttgtcctttagtctctgtagtgagtaactccttactgcatactcagcatccattacatcctttcttcctaccaaggctccagttttattcaggaatctactccttcctagagcgtaagtgattcaggggaaacaaactgcatgctcaactaataagtctgagcccactgtgataatactgcctccactcccaacccagacctcagtgattagtttaataacccagacttaaaccaatcagcacatggtattcccctagtatcttctcagttcgcagtttgctttgtgtcctcacgcaaagtcaggctaaaatgactcagtcaggctaaacggaaggatttttaggtcatggctctgaaaaggatttttttgcttctttcccactggataacagcaaggaagcacataactccaattgctactgcagccattttcatgaccacaaatgcaaccagccttatcggtgaagccaacactgtggatagcagagcagaagagacggaaagtccctgggttctggatgacatcatgaaactcctgaagtagcacactccggaggctaccctccctcttcattcttgtgtgctaaggaatttccttatcctctgctgtaaaatgcagacacccactgaagttatttgatgggcaactgcctgtcactacaaatactaccagagagtgagttttctctgcttaattgccttaaggatcaaaaatatcaaattctgaggtgcagtcttaggagggctgaaattactttatcagagacaaaagatattcccatagtgtccactgaaaacatatctaatgtattcaatgctaacttttcttttttctttttgagacaaggtctcactctgtcatccaggctggagtgccatgatgtgatcatgacacaccgcagcctcgaattcctgggctcaattaatctacctacctcaaccttccgagtagctggatctacaggcacatgccaccacacccatctaagttttgtatatttttgtagagatggggtttgccatgttgcccacactggtcttgaactcctgagttcaagcaatccacccacttcagcctcccaaagtgctaagattgccgggcacggtggctcacgcctgtaatcccagcactttgagaagctgaggcgggtggataacctgaggtcaggagttcgagaccagcctagccaacatggtgaaaccccatctctactaaaaatacaaaaagttagctgggcgtggtggcagtcgcctgtaatctcagctacttgggaggctgaggcaggagaattgcttgaacccgggaggcagaggttgcagtgagctgagattgtgccattgcactccagcctgggcaacaagagtgaaactccatctcaaaaaaagaaaaaaacaaaacagaaaaacccaaagtgctatgattacaggtgtgagctactgcgcccagctcatatctcttctaatgtatttattctcccacattgcaaagtgacaatttaaaatctttatccttgttccaacctaatactcattccccacctcctcaatctcagttgatgatacagggaaaatggaagtcatcagacagtacttccttatttttccatccccaaatctaccagtcttcttatatttgtacaagaaagaatgtccaataaatttcactccttatatctgtggataatttcttcctgtcaaactgatttctctcaaagtattccccatcccatttggctcactgttcaagcaaaaagttcaactggccttgattcctcactatgtcatacgcccatacccaattaatcagaaaggataactggctttactccagaatacaccccatatttgtctcgttctctccacattcactcctgccaccctgcttaactgttttttgcttggactactataacggccacctaattttccaattttctctcttccccctctacattctcaataatatagtgagagtggttttctcaaagtataaattcggtcatatcactcccttgtctaaaattctccagtgacagcctctgcacttagcatgaatccaaactcttctccctgagctacagcatcctgcatgagatgaccactatccctctctacattcatctcagaggccttcctccagtcacactgaccttccagtttcttgatccagcctcagggtttatgcaggaaagatttaatataagcagggtacttgcagggtaccaaaaagcagtgcaaaggcccaaggttactgtcatcagaagggcctgcttgctgggctagctcttggccagtgtgtaagaacttctgaagtgttctccatgttgacaaagctcttttgtccacctggggcgctgaacacttgctttcttcagggcgtttggtattttggtagttaaggctggtctttatccctatgtgaccaacccccaataaaaactctggactctgagacttcagtaggcttgcctaggcagaaacacctcatgtgtgttgctggatttgactgctggaggaagaagcaggttctgtgtaatccctggcatgagggtgttggagagacatagaaaccctgtaactagatgctccggattccacctcatatgtcttttcccttttctgttcaatgtaataaactaaagccttaagtacctctgagtcctgtgatttctcctagtgaactgctgaatgtgtgggaagtcttgggacccctgaaactggtctgagcctgcagcccccagatcatgcctcagctatctactcctggcatagctgaatgttaccacctctgaaaaaacaaatactttgttttattgccatcatctcatttattgtttttaacacatttcttgccatctcatctcaaatcatcaaggtattttagtttttatttatttatttatttattttgtagagacagggtcttgctgttgcccaggctggacttgaactcctggcctcggaactcctgtctcagcctcccagagtgctcggattacaggtgtgagccactataccccacctgtcatctcatttgattacaatacaatccatgcttcactgtgccttaaaagtgtgatattcaaaaactatttttgttttttgtacccttgtcttgacatgatggagatttactggttaaaaaacaaaataaaataacaagagataacagatagtgctcaaagtctgtgaattataattgtgttactggaacttgcagagtaccaaaaagcagtgcaaacagatgagtgtcatctatagcctctgtagctactacacacctctgccattgtagcacaaaagctgccacagaacatatataacttcataagcatggtcgtgtcaaataaagcttttatttaaaatgcttatacttttattaaagtgcttaaaacagtgctgagaacagggtctcactatgttgcccaggctggtcttgaactcctgggctcaagtgatcctcagaccttggccttccaaagcactgggattacaggtgtgagctaccatgcttgtccaaaaaaaaccattactattaccacagattgagttcagaatcatgacattaaaataatgtattcttcattaaaaaaaatccgcaagttttttatagagtaacaagatacttgatgatatggtttggatatatgtccctgcccaaatcgcacattgaattgtaacccccagtgttggagaaggggcctggtgggaggtgattggatcatgggggcagatttcccccttgctgttcttgtgattgtgagttctcatgagatctgctcgtttaaacgtgtagtacctcccctttctctctcttcctcctgcttccaccatacaggacatacctgctcaagccctttgccttccaccatgattgtaaatttcctgaggcctccccagccccatttcctgtacagcctgtggagctgtgagccaattaaacacattttctttgtaaattacccagttctttaatagtaatgcaagaacggactaatatacttgaacttaagtttaatatgcactatcattaccaaacaatataaataaagcagaaaatgtttagttttccttacctgacatgtctgctgaatcacctataatggaaaataattatctataaataacataaatctgtaaaatctgtaaaaacccaaatatcatattaattataatttaaactattatatacaaaattggttttattacatttgattgagtaaactgtaagagaaggcactcatttcaatcatacatacttattaacatgctatgtatgatctttcaatcttcctttggataaaaattttgttttctttgcatttaatgagttacataaacttttaattataataacttttaaaatgatactgatatgatttaaaattatattaccctcattttggtttataaaaatgtactgctaataatagactctctggagttttaatgacagcaaaggttactatataactcaagaaaggaaacaagttctttctttcaactaaagattttccgtatgcatcttttaatgcatctctgtctccagggaagaattagatctaaaccttctgagctgagagacatgatggcaaagcttactgtataactcaagaaaggaaaaaagttctttctttcaactaaagattttccatatgagtacaagtttgccaagaaagaaaatgtgaaagctcatgctcattatatttgtggtagaaatacctaataaccaaacttttcaaagtagcagtctttagaacaagaaagaaaataaaaatataggaatccattgaagacaggtgattgttttttgctttggtaaagctttatatccatatgaaataatgatttaaaaaacatattgataacataggaccatagtgccttgacctggaacatgaggaaaaacagaataaagtacttaactctgctgagcagaccacataggaaatatcatttttagttatgaatatgctctattaacaaccaaatggtgagagggcttggaactttgccacctgaagcctgggtgaaagactgggagtgtttggtctggagagactaggtttgtctctgaatattaacagggtctgggacagaagtacaaatgaaagcttgaatgtcatcggcctaaatattttaaagctatccatcaagataaaacttatcaaataaaatatattctagcctcttaccttgatgagtacactcctataatgatctggaaggcagataccaatttagaactccttagagtttgggcagcatgagacaacctgtctcattctcttccatcccacaccacaaagaaccatggaagctcatgtgtggtgctatgaactggatgtctgtcttcccccaaaattcatatactgaaaccctaatcaccagtgtgatggtattaggaggtgtgaaggttatgaggatggagccctcacaatgagattagtgttcttataagagacaggagaaagataatcttttttcaccatgtgaggatataatgagaagacagccatctgcaaatacagagaaggccctcaccacaacttgaccatgctggcaccctgattttggacttccaacctccagagctgtgaaaaataacatttctgttgtttaagctacaaactctgtggtatctgtcatggcagctcaaatttcttaagacatgtggttatcctagctactgcattagaactccatccacccctacacaaagaacagcttggccacccctcaagagtatacacattggttgtacagtctgtcactgggaggacagacgcagagaaaaggctcatgcagggccattagtaggttcaggaccatctggtagagaattctgggatttcatatacccaaaacatggtccagtggagaagtaggctcccccatggaaagcaatccccttgctctcatgtacaccttgttccatggaatgtagttggagggtgccaaaggagaccttttaaaagagaagcaaaaggctgggcacggtggctcatgcctgtaatcccagcactttgggaagccaaggcgggcagataacaaggtcaagagatcaagaccatcctggccaacatggtgaaaccccgtctctactaaaaatacaaaaattagccaggcatggtggcgtgcacctgtagtcccagctactcaggaggctgagacaggagaatggcgtgaacccgggaggtgggggctgcagtgagccgagattgtgccactgcactacagcctgggcaacagaacgagactctgtcacaaacaaagaaacaaataaaagataagaactagataagactcagggagaatatgctagctgtctccaaaactggaagataatgccatgggaatgtgattagatgttctagatacaccaagaatgagggccaaagagtagcaatcacagacagatttctgttgtatatgaagaaccactttataactaagcttcccagggaaacgtttacttcattaggtattaagtggcagcagggttcaaacacactgtaacagagaggacaaaatgatatacttggccctaaaattccaagattctatccaggaaaaaagtttgaatgtaactggctaaaatagtacaaaatcaaacatttcaattactctatgatctatatgatttttaacagaaggaacaataaacattgtaaatgctgttttgtgttttgtgggtattaaacaagcctgacagcaaagtaacaaaacaattctctttatgtgtgaggagaaaaataaaatcctttcttattctttagtcttcccttgagtctatcttaattagtcaccagtaatttttgttatctgtcttctggaagggtacaaatggtgtaaagaatggagctacatatataatctaaaatttacctctgtactccccagattttgacttggaaagaaagaggagggatataattaaacatttcatattttctatagtgttgtctttcaaaataaaggggagaaaagggccaaattcctaaaagattaatttgtgaccatgacatttcttaactaagaaagaaaaccacagcactaaaatgataaataagttgcctaacagagggagagcaaaggaaagaaaaggagaagccaaggtgggaaatgaaagaaccatattctagaattctatttgcagaacgtaaatcccattaatacagggattttgcctttttgtaagtagcccatatccccagcacctaaaacaatacctcgcacatggcaggtgttcagtaaatttgttgagtaagtgaatttactcaataaaaattaactaaacagtaactatgtaccaagaggcattgagctaggtacttaggtaacatagtttcttcattcctcaaggagatgggccttgttccttgtgcacagtgaaaataagacttcactttccaaaatcttagcacaaacagaagctagacctatgtatttatatgcaaagattagaatattttctgtataatgggtaatgttccatttacttttaaaagtagaaaactgtacaaaaaggaaaaacacaagggtctatgtggcatagcttcagaaccaggcaacccagacaacaaattcctgactatcaacttagtactcgcatgaaaaataaagatattaaaagtataaattatcttagtcaagaagaaaagggacctggaaagctagcttagccatcaaggcccaataaattccaacaaactcaatgatttcaataaattttacaaacgtattgaagtttatgaaacttctgccatattcatatttagtaatcacaggttggcagatatgtcctaaacagacctgccatcctctcatcagtttggctgtagagttatggcctttgtttaacagtttttcacagaggtaaaagaatacaggtatatttcaaaacagctcaagacagttggtgaattaggtcaatgacaaagaaaagaaaaaggcagaagggatttaccaacaacaaacagacttgggtcctctcttctttccagcctgaacccccacggaagcagggttctaccccgcccagtctagttatttcttagcttccctttgtttactacttcctcttcaaactcctcttttctgctttatatgctattgacttaaacctttttgctgaccagaaattcctgctaaaggactaaatccaactatttcaactaccatacaatagtttcctttaaattttggattgtcaagaccaactcagataaccagagtgagtgagagaaaggtacctgaaagcaaataatatggtataattgggtagggctttatgtatacatagattttgaacaatcgataaatcaataaaattttgattttttccttggatattgaatttatttgaacaaagcaaatgctttaaattgtttctttttaaaatacagaaacatacctacttggccagttgccactatgttgataaatttggggtgctggtttactgtgaggcacagaatatcatcattatgttcctgataaaaactctgagaacctacaaaaaagaatttgagaattaagtttgaaaattttaagatgtaacagccaaaagcacttacccagaacaataaactactctttaacttatttgcttattcaaaacatgtttttgagcacttactatgtatacagcatcataaggatagaaaaatgattcagaattatgtaatgggatagagccgtaaaagggataaacaatacagtacaaggctgaagattccaagtgccacaagagagttgggatcaaaatgctatgggaattcagagcagaaaagattaatctcatcatgggaatatggtactcctggactgacccagatagattttacaaatgtaaaagtcagtggggaagggccttctagacagaggaacactttaagcagaggcctaaaggcaggaaagtgttgtgtatccatataacaggctcatttggctgaagtgtagggtcatgaagaagaaagatgagtaacatggttggaaaggcagcttgggactagagttagggaggattttgagtgtcagcccacgatccttctgttttggtttctcaaagaaaaggatttgccagagtcacacagaaaccagtagtaattttccatttaataatttgggccatattgagtcacattttatatttgttcttatgtcagtggaggaagaactgcaatctgtttttgtttttttgagacagtctcactctgttgcccagggtggagtgcaatggtgtaatcctggctcattgcaacctccacttccctggttcaagcaattctcatgcctcagcctcccaagtagctgggattacaggtgtgtgccatcatgcccagctatatattttttgtatttttagtagatacggggttttgctgtgttggccaggctggtctcaaactcctggcctcaagtgatccgcccatcttagcctcccaaaatgctgggattacgggcatgagccaccgtgcccagcaggaattgaagttttttgatcaaataagtataatgtgattcatctggtagtagtaacagtgaagagaccttgtaaggctatgacagtagtccatgcagaagggaaaaaagatagacttgtggaagtaaaatgaagaggtggaaaatgagttcagagcagtaggttggatccagaggatagagaaaccatgaatactactaggccccccaaaaagcaaaacaaaaatcaaacaagtggggcacttcaacaacccactgatagtgttagatcatcaaggtagaaaactaacaaagaaattctggacttgaattcaatacttgaccaattggacataacagaaagaacactctgcccatcaaccatagaatatacattcttctcatctgcacatgaaacatactctaagattgaccacatgttcagccataaagcaagtctcaataaattcaagaaaattgaaatcatctctgccatactctctacccacagtgcaaaatagaaatcaataccaagaagagctcccaaaaccacacaattacgtaaaaattaaataacttgctcctgaatgacttttgggtaaacaatgaaattaaggcaaaaatttaaaaaaaatcttcaaagtagattaaaacagagacacaacataccaaaatctttggcatgtagcaaaagcatgttaaatgttaagaggaaagcttacagtgctaaatgcctatctcaaaatgttagaaagatcccaaattaacaatctaacatcacacctggaggaaatataaatacaagaacaaagtaaccccaaagctagcagaagaaaataaataacaaaatcagagcagaaatgaacaatactgaaacccaaacatctatacaaagaatcaacaaaataaaaaaatcggttttttgaaaagataaacaagatcaatagaccactagtagttagcttaacaaaaaaaagaagatcccaataaacacaataaaaaatgacaaagatcacattacaaccaatcccacaagaacacaaaaggccctcagagactattatgaacacctctaaatacacaaactagaagatctagaggctatgatgttagttgtgggcctctaaaaaaagaagaagaagaagaagaaaaatctagaggagatggataaattcctagaaacacacaacctctcaagattgaatcaggaagaaactgaaatcttaaacagaccaataatgagttccaaaattgaatcagtaataaaaaacctatcaaaaagccctggaccagatggattcagagctgaattctcccagacatacaaagaaaagctggtgccaatcctactgaaactattctaaaaaatagaggagtgggcactcctctctaactcattctgtgaagccagcatcaccctcatacaaaaacctgccaaagacatttgaaaaaagaaaactacaggccaatattcccatagaaaactacaaaacatcccacacaaaacatcattcccatacaaaacatcatccctatgatgaacatagatgcgaaaagcctcaacaaaatactagcaaacaaaatccagcaggacatcaaaaaattaattcaccatgatcaagcaggtttcatcattcctggcatgcaaggttggttcaacatatgcaaattaacgaatgtgatttaccatataaacagaattaaaaacaaaaaccatatgattatctcaacagatatggaaaatgctttcgataaaatccaacatccctttcatgttaaaaaccttcaacaaactaggaattgaaggaacacacctcaaaataatgaagcatttatggcaaacccacttcctacactatgcacaatgtatcctcaaactggtgagaaaccaaatataataaaaactaaagcaggtggcctagtctccatctgccctctctctagacaccccaccactagaaaagtgattaattacaaatcagaaaagtaaaaataaaattataagtataaacatgagagtttacacatacattcctttcttgtttatcttactcttcctcattctctctgaaggacagacagacctcgattaagaaggatttttctctctaatcagtatgttttaaatggcccaaattattaaatagaaaattgccactgatttctgtgtgatcctggtgaatccttttctttatgaaaccaaaatagaaagatcatattgatggttaataccgacaagaggtggtggattataattcacatcatcaatctactctttacccattcaggatgaagctatcagaggaaaaccagaatgaactagataacctttatttttacttctaactttcagacttttatgaagtttgccattaaattgtaataaaacaattcaaaattaaatacttaatgttactagtagcattatcacattgttcatgaaatgatgctaacagaacattatttgctcttgaataatccaactgaataacccaatcagttaaatgaacatcaagaaataattttctcaccttcttggatcaaacaaggtatcatcatagagccacagataaacagctttcttagcctttcttccttggctttccaaggcctcagtaagaacacttccagccccagcaatcactcacccaacatgctacattcaatcactatcagaaaccaccatccaaaccatctattctcatcatgaggttatgggaaaatagaattaaagttacaaacggtttcaacataaaacatggttttaacatacagtaaaacctctacttctaatagagacttatgagcactttgcattatgaattccttttctgctgtattatactctcttaaaactgaaatttgtttacttgaaatattactagaaagttctgaaatatgaaatatttttattctggagtgtttctcctacatttcaattactatttatagctttaacaaagattttaagctgctagatcaaaatttctaagttaaaaaaattgatagagggatggagaatcagggtttcctacctgtagcaacattgtgcagaattccaacagatgcagtgtgataaattatatcatcaccatcatttaaatagtgaacattattcctacagtctctgcctcgataaccaaaaatgagctccaacacaaggtcctataatgataataataaaaccattatattcttcctcatgtataaatgttcaccactgttttgttgtatacgtaatactagtagtgtctgcagtcaaaatggagtatgcatttttgatgttttacaaacttaatatacaaaattaagctactcatacttctttatataacctgttttgggcagcttaaacatacattctatacttttctatataaagttatgaaaaggaaaatggaatcacaaggtagtctgattccaagaactttagttcttaagatttcacatgtaaacactgaggtacagttggccttacatatccaagaattcaaccaattccagatagaaaatattggggaaaaaaacaataaaaaataacatttaaaacacaatattgtataacaaatatgtatacagcatttacactgtattaggtatcataagtaatctacagatggtttaaagtatgcaggagaatgtgcataggttatatgcaaattactatgccattttatataaggcacttgagcacctgtggattttggcatccccagggggaatctatcccccatggacatagagggactgtattttttgtgtccaaaagaagaaaattttatgttcattgttaatcaaagtatctgacctacatacaagagtcaggataaattatgtccaagtcacatacttcgaagaactcaaacagtacattcatcatcggtggataaaaactaagtatactgtctctgacaattcatgctaaagttctggcagataattctgcaactgaaaatgtacatttcattgactttgtaggactaggttggggagggaacgacagcaatcaccatcgcacagctttacgccttgtttacgtttgatttagcagagtttggttgttcgctactgctaccgggattatgaaatgcctaaagagccttccttcttcctcaattattacgtaaggttactttggctggaagcagagacagaaggagaaacaggcttcatgaaccctgtacagtgaatatatcgcacagggtcaaaattcctatttggtataagtacttactctttaatttacaaatttaagccactaaattttagatactgccaaggtgtctgtgcttctataagcaaaagatcattcacacatacttaggtttaggactcctctgagatacagttcaattagggtattattcacagaaaagtaaaaggaagactaatttaaaaaattaagagaaacagagaatatccatccaaaactcagacttacataagaattaagtcaaacaaaaaacagtactcaaatacactgattttcatgaaaactaatgacaaaacttgggtgttttataaaaaagaactctggatacatttcagtaacactggagagtgagttttccttacctctataggtctctttttcttgcctacattgtttgtctggagtttctctggctgtggtggggccctgctcactggaggcctgcaacagagaagtggggaggaggaaaggcatgcagcactcagtgccttcactgagcctctcacaccatccctcccagagaggtgtcttgtcacaccttcccaaagatgacccattctgtggtccactagactgccctcttcatcttgagagcttctaaagcaggaaggtagaaagaaaatattacaacttttattcattttattttattttttttgagacggagtctcactctgtcgcccatgctggagtgcagtggtgcaatcttggctcactgcaacctctgcctcctggattcaagcgattctcctgcctcagcctcccgagtagctgggattacaggtgtgtgccaccacaccagataatttttgtatttttttagtagagacggggtttcaccatgttggccaggctggtctcgatctcctgacctcaggtgatcggcccgcctgggcctcccagagtgctgggattacgggatcaggagtgagccaccacacccagccttttctcttctttctttctttcttttttagaccaagtttcactttgtcacccaggctggagtgccgtggcacattctcgcctcactgcaactccacctcccgggttcaagcaactcttgtgcctcagccttcccagtaactggaacaacaagcgtgcaccaccacactcagctaatgtgtgtatttttagtagagatggggtttcgccatgttggccaggctggtttggaattcctggcctcaagtgatccgcctacctcggcctcccaaagtgctgggattagaggagtgagccactgtgcacagccttacttttaatttctttggtgtacgtgtcataatgtaaataacagcacaagagtagattgtttataaacaaatgtgaaaatgttaatttaacatactcaaatatttcttgataggtacattaacaacaaagcctggattactgttctaaagtatctaacagagtatcttcacatggcaggtattgaatacatccttcttgaaagtgaattttcgtaatatttctatgaacgttccacactgttagcaacataaatcacatccgagttcaaatttgtatttatctgtttctccatgcccttcaccttctctacttgctgaagtccctagtactggttaatggcattgccatcagatggttactcaaggaagacattttatagtcacaaagcactgtaaaccatacaacacactataaaaggaaataactattattattgcttccaactctttctcttcccttattctcactatttactaaaaatgtatcaactttacctacacagtagctgtcaaatctcaaatctagcccctcttctctgttcaggatctatttataatgtgccgtgtcccaacaggtatattgagttcacattttgaattacttaaatgtagaagctcttctctagaacctttaatttttttaaaaaatgcaatttagtttattatttttatctcaaccattattcaaatactgaataaccggaacattgaatttaaatcaatcatgcaccaatccctttccaaattttaagttaatattcaatttgtaacacctaaatcaggaaataatacaaattaaccttcccatataaaagactccaacatttatgaacaagtctcataaaattaaaggcataaaatatacttgcattttcaaaatggttgtcaagttaaacatcaataaaagtaaatgtgctatatcttaaacatccaataagaaatgaatgggatgttgatacgcaatatgaggcagcatgtaaaatatataagcatgactggtgtcataaaaagtaaacatccttttcaagaatatataaacaatgttttcaaaccttcttcatatacttttttggatgcccacaagtaaaaataaaactgaatttatcatatttaacatttaaaaatatttctgacaggaccatttcaaagaatgatagaagccttgcttttttccccaagtcaattttgttggtgaatattattctatgttactgtctgacagctttaaatgtaacccaaacaataaacaggtaatttttatctatataatcctatataacaattaaccacattttaatttttataaagatcatttaagcatattttaatttttataaatatcatttatataaggtatatcattgctgaaaataaaattatacaacttataaaattatacaagttgaatggataagttttagtaaagcagttacttatacagagtaagtccaataattaagatgttattcatttcagtgataccaattccaaaggaaaaaaatgtgcaaaactgtgaagagaggtaaagaacactaagtaacagtatcccattaatgctaaatatggaagatgacaaaaatacaaagttaggctttgtaaacacagcaaagagaggattacctggaacctcttttcagcagcagataaagagggaaaaagattacaacataaatttgaattgaaaacactagtgaaatacctcctgtaataaaatattttaacaagtttaatgcagacagctatattgcataatattaaaggcctgttgtttttagtttataatcccagcactttgggagcccaaggcaggaggatcacgaggtcaggagttcgagaccagcctggccaacatggtgaaatcccgtctctactaaaaatacaaaaaacattagccaggcatggtggcacgcacctgtaatcccatctactcaggaggctgaggcaggagaactgcttgaacccaggaaacggaggttgcagtgagccaagactgcatgcgccactgcactgcagcctgggcgacagagcacgactccatctcaaaaaaaagaaaaaaaagaaagaaaaaagaataaagaaaaggcataaggctgggcacagtggctcacacctgtaatcctagcactttgagaggccaaagcaagaggattgcttgagcctgggagtttgagaccagcctgggcaacactgtgagaccccatctctataaaaaacacaacaattagccaggcctgtggcacctatagtcccagctacatgggagggtgatgtgggagaatcacttgacctggaaggtcaaggctgcagtgagctgtgatcacatcactgcactcagcctaggtaacagagtgagaccgtctcaaaaaaaaaaaaaaaaaaaaaaagggttactccattaattaataacagggaatcacaagaaaggtgaaaaaagaaaaaaacaaataaatgagaattcaatatatttcatgttgtgaactttaaagcttgccattcttatttttctgcaatataatctgaattttaaacaaaacatttaagcttatttttgtttttaagaatgggcactggcactaaaatgttaatttaaaaagctggtagcactggagatacttcaaaggaaattgtctaaagagcctaagttccacctgttctgacctaagagggttccccagtcagtgaatccaagcaggcagaattagtcactcgggactatgctgaatttagaattttgctagtaaaaaaagtaatctttaaaaagttttttttctctcttaatagcataatgatcaaaacaaaattggaaggaatcatgaaagtcatttcatccattttcccactgagaccaggaaccttctttacatgtctagaacaatcattgtacagctttgatgacaactaatcatctaaactctgtataaatactgcttgtgacaggtctcttctacataaaaagccattcatatccaagataacaatgatatctccatttagttttcttgttttgaaacaagattcccagaataataattattatatttttttgagacagggtcttgctctgtcacccaagctagagtgcagtggtgtgatcatggcttacttgagctttgacctcccacgctccagacatcttcctgccacagcatcccacgtagctgggaccacaggtgcacaccaccacaccctgctaatttttaaaattttttttgtagagacggtgcctcatcagattggctaggctgatctttaactcctggcctcaactgatccttcaaacttaacatcccaaagtgctgggattacaggcataaaccactgcacccggtcaattaactattctttatatgaagtggcctcccaacctcccttcctcctgtgctttcttctagcccattataaactatccaagtctcctttaaaatgtagagatcagtactgagtaagctattctagatgtgaggctagatccgggtgctttatttctggtaaaatagtataagattttatggcccattttagaggttgcttcatactctgaactcatatctttgtacacaccactctgcttaaaacagatgatggattcctgctgtagatataatattaacaggtgcctattatttgagtttctgcaccatctggtctcaagtctactgttttcatccttatctcccagcattttcctagtgataccttcctcccgccaccccccacccccgaaacagggtcttgctgtgttgcccaagctggagtgtagtgatgccatcacagctcactgcagcctcaaactcccaggctcaagagaccctctcacctcagcctcctgagtagctgggaccacagggctgccaccacacccagctaatttatttttacttttattttttgtagagacagggtctcatcatgttgtctaggctggtcttgaactcccaggctctagcaatcctctcacttcggccttcccaagtgctgagattacaggcctgagccacaattacaggcctgagccaccgtgcccagccatgataccttttttaatttataaaacagactagccatttccacactgtcgtttcagaaactctttcaagacattttcacatcaccaaaggtagatataaaagtaacccaaagagtctttacctacatgtcattttattaaacatacaaataccatagttaccctcttttcatctttttaaatgaatggattaaacatgcattaaatcatgttaacaggtttaaaattgaatagtctttcacttaaatatatgtgtggttaggtttgtttttacgagcctctgaaacttaaagaaaaccaaaactattcatttgcattgtagtagtttgtacagtcatatgtaaaacaatttatcataatgaagacccttataataacaaccatatatgctatctaaaaatgcaactcttttatagaatttgtcctacttcattttataatgctttgttgacaaatgtagttaaatgttttatagggaaaaaataccttaaaataccataaagaataaaataaagggtaaatttttgaataaaatattttcttttataaaacacttaccttactactccctgccttcaaaaggagcaagggggaaaaaagtaggaaaacatataaaaattgatgatgaatagaatacagcattttagcaaacagaagaaaggcaacatgtcaacagaattttaaggaaatacaaaaatgtctaacttatgtcacattggtttaaacattgatttaaatatttttattcacaaatactggaaatttgacaaaaattaactactttaaatacataatatttgttataaaaacatttattggctgggcaaggtggctcatgcctgtaatcccagcacttcgggaggctgaggtgggtgaatcacttgaggtcaggagttcgagaccagcctagccaacatggtgaaaccccgtctctactaaaaataacaaaaaataactgggcgtggtggtgcctgcctgtaatcccagttactcaggaggctgaggcaggagaatcatttgaacccaggagttggaggttgtagtgagccaaaatcgtgccactgcactccagcctgggcgacacagcaagactctgtctcaaaagaacaaaacaaaacaaaaaaataaaaacaaaaacatttattaaaaaagaaaaaggtaaaattatcacttaggaaaaacatccacgaaagtatcaaccaaatagaatggttattgtcatcagaagcatttttccttttaagtggatatttgataagtatttaattgtttttaatttttttttcatttatttattctcccagagacaggatcccactctgctgccatagctggagtgcaagggtgcgatcatagctcactgcagcctccaactcctgggctgaagcaatcctcctgctcagcctcctgagtaggaacctcctggtacaggcatgtactaccattcttggctaatttttctattttttgtagaaatggggtcttgctgtgttacccaggctggtgctaaacacctagtctcaagcagtcctcccacttcagcctcccaaagcactgagattgcaggcatgaggcacagcacctggcctgttttccatataaagtgctttatttcatatttatgacagtaatatatgttactaaaaagcaattatttaaataaaccatgaaccatattatctcctcacaaatattctaagttggtaaaagagatatgaacctcttcatttgtaatctcctttgattttttttcattttgtgaaaatgaaatcacattgatgacttctgccttgtcattttctttttttttttttttttttttttaaggcaaagagtagagcttggactctgccacgggggccaacagaccctctctctccctccccacaccttgtcattttcaaaatatttagcagggttgaaattgtaaagtaaattgagaacaaaatgcaaagcaatttgaaaaattactttgaaaaagttagctgcagaatatacaagctaacatcaaagatttcagttatgacagtgttaatcattcttcatgagtagtaaaatatttccatctgtcagaacatgcctcacttcagcaatgggtggaaatttacatttaagtgttttaccgtgaatgaagcagactacagattaaaattaggtcacattttctgacataccaaatttatccaataaataatttttttaaaaaatcaatataacaaatgaaagaaatttatgggaatgtctagagccccttcttccccatagaacacttttcacttttcattacttaggagacataattttccttaagtcatattaaacactacacttcaaatattctaattagaatatttaaataatattatattttcatatttatctgtatttatctaataaatacatatgtagcgcttattgctttgtgaatatttaatttcagaaataatgtttaagtatttaccaggtatctcctcagttaactttcatttcattccaagggataaggtgtcattaatgaagacctactatctaaattcttgatttacattatttcatttaaaacttgaaatataccataagttagggattataatgttcattttgccactgaggaaactgaggttcagaaagaatgaataatttttcaaactcacacaactggtaatgaaaaaaatgagtattttacccatttgtctgactccagaattcatgtcctttgcactatacgatgctgcattctagcaagttacttgaaacatggaattctgtacaagtacttagattatggtatactgtgctttcttaaaaatatccctaatttaatactttgcctctttatacataatgaaaaactggatgatcactctccatcccctttccttaggtgacctcccattgctatgatctgaggtacatgaggtataccatcagcaaacgacacctggaaaaggagctgaggaggcactgcgcccttaacactccatctagacttccctggcaacgcgggggtcagtcaatttacaagatctctcagttctcccttccccattactaacgtgtttttcaccttaacttcatccctttccccgaatataaaatccataggtgcaaactcaaatccctctgacgaagctttcctgtagtcatttctatctctctgagttccaaaattcttcagcactatcctaaatggccacaaattcgcttgaattttctacaaatcctgttcaactgtgaatgaattcccttttaatttctccctcaaattgtccactaacttctcataataaagttttcctcaccacaaccttgttctcacctcccactccctctgttccttcttactgtttctggatcttttccttttttgttctttaaacctctttgcttctgaagtccatgccattcaatgctccatatccctttttattgtttaccacctttgattttgaaacactagtttcacaatttatttcttaatctgtcatctagctcagagactttattaaaaagtgatctctaaattactttgggcagtatggccattttcacgatattgattttttcctatccatgagcatggaatgtttttccatttgtttgtgtcctctcctatttccttgagcagtggtttgtacctctctttgaagaggtccttcacatcccttgtaagttgtattcctaggtattttattctctgtgtagcagttgtgaatgggagttcactcatgatttggctgtttgtctattattggtgtagaggaatgcttgtgatttttgcacatttatcttgtatcctgagactttgctgaacttgcttatcagcttaagaagattttgggctgagacaatagagttttctaaatataaaatcatgtcatctgcaaacagagacaatttgacttcctcttttcctatttgaataccatttatttctttctcttgcctaattgccctggccagaacttccaacaatatgttgaatcaaagtagtgagagacagcatccttgtcttgtgccggttttcaaagggaatgctcccagtttttgcccattgagtatgatattggctgtgggtttgtcataaatagctcttattactttgagatatgttccatcaaaacctagtttattgagagtttttagcatgaaggggtgctgaattttatcgaaggccttttctgcatctattgagataatcatgtggtttttgtcattggttctgttcatgtgatggattacatttattgattttggtatgttgaatgagctttgcatcccagggatgaagccgacttgattgtggtggataagctttttgatgtgctgctggatttagtttgccagtattttactgaggactttcacatcgatgtttaccaggcatattggcctgaaattttctttttttgttgtgtctctgccaggttttggtatcaagatgatgcagacctcataaaatgagttagggaggagtctctctttttctattgtttggaatagccagaagaatggtaccagctcctctttgtacttctggtagaattcggatgcgaatccatctgggcttttttttggttggtaggctattaattactgcctcaattccagactttgttattggtctattcagggattccacttctggtttagtcttgggagggtgtatgtgtccaggaatttatccacttctagattttctagtttatttgcgtagaggtctttatagcattctctgatggtagtttgtatttctgtgcaatcagtggtgatatcctctttaacattttttattgtgtctttttgatttttctctcttttcttctttattagtctggctagcagtctatctattttgtcaatcttttcaaaaaaccagctcctggattcactgattttttgaagggttttttgtgtctctctctccttcagttgtgctctgatctttatttcttgtcttctactagcttttgaatttgtttgctcttgcttctctagttcttttaattgtgatgttaggatgttgattttagatctttcccactttctcctgtgggcatttagtgctatacatttccctctaaagactgctttagctgtgtcccagagattctggtatgctgtattctttgttctcattggtttcaaagaacttatttatttctgccttaattctgttatttacccagtagtaattcaggagcaggttgttcagtttccatgtagttgtatggttcagagtgagtctctccatcctcagttccaattcaattgcactatggtttgagagactgtttgttatgatttctgttcttttgcatttgctgaggagtgttttacttccaattatgtggtcaaatttagaataaatgtgatgtggtgctgagaagaatgtatattctgttgatttggggtggacagttctgtagatgtctattaggtccgtttgtccagagctgagttcaactcctgattatccttgttaattttctgtctcgttgatctaatattgacagtggggtgttaaagtctcccactatttttgtgtgggagtctaagtctctttgtaggtctctaagaacttggtttatgaatctgggtgctcctgtattgggtgcatatatatttaggaaagttaggtcttcttgttgcattgatccctttaccattatgtaatgcccttctttgtcttttttgatctttgttggtttaaagtagattcaatgctatccccatcaagctaccaatgactttcctcacagaattgaactactgtaaatttcatatgaaactaaaaaaagagcccatatagccaagacaatcctaagtaaaaagaacaaagctggaggcatcatgctagctgacttcaaactatactacaatgctacagtaaccaaaacagcatggtactggtaccaaaacagatatatagaccaatggaacagaacagaggcctcaggaataatgccacatatctacaacaatctgatctttgacaaacctggtaaaaacaagcaatgagaaaggattccctctttaataaatggtgttggggaaactagctacccgtatgtagaaaactgaaactggaccccttccttataccttatacaaaaattaactcaaggtgaattaaagacttaaacataagacctaaaaccataaaaaccctaaaagaaaacctagctaataccattcaggacttggcatgggcaaacacttcatgactaaaacactgacagcaattgcaacaaaagcaaaaattgacaaatgggatctaattaaactaaagagcttctgcacagcaagagaaaccatcatcagagtgaataggcaacctacagaatgggagaaaatttttgcaatctatccatctgacaaagggctaatatccagaatctacaaagaatttaaacaaatttacaagaaagaaacaaccccatcaaaaagctaaggatatgaacagacacttctcaaaagaagatatttatgtggccaaaaaacatgaaaaaaagctcatcatcactggtcattagagaaatgcaaatcgaaaccacaatgagataccatctcacatcagttagaatggtgatcattaaaaagtcaggaaacaacagatgctggagaagatgtggagaaacagcaatgcttttacactgttggtgggagtgtaaattagttcaaccattgtggaagacagtgtggcaattcctcaaggatctagaactagaaataccatttgactcaggaatcccattactgggtatatacccaaaggattataaatcattctactataaagacacatgcacatgtatatttattacagcactgttcacaatagcaaagacttggaaccaactcaaatgtccatcaataatagactggataaagaaaatgtggcacataaacaccacggaatactatgcagccataaaaaaggatgagttcatgtcctttgcagggacatggatgaagctggaaaccatcattctcagcaaactaacacaggaacagaaaaccaaacaccacatgttctcactcataagtgggagttgaacaatgagaacatatggacacagggaggggaatatcacacactggggcctgtcagggagtggggagctaggggagggatagcattagaagaaatacctaatgtagatgatgggctgatggatgcagcaaaccaccatggcacatgtatacctatgtaacaaacctgcacgttctgcacatgtatcccagaacttaaagtataattaaaaaaaagtgatctctcctcataaaatggccttgcatatgtccttacttttttatttgctgattctagactaagaccaataattcccattaaagacaacctgcctttttagaaaatttttgaaatgaggactgactatgcttaaagaaaggcacatggataggcaggccttttcaaaattgaatcacaatactgctcacatacttcttaaaaagtactcggtattggattcaatttttattatctcctccaacctcatcacacacatttataaaagttagcaaataagatgaatcatatcaaccttataaacatgtataaatccctaaaccaatagtgttaacacatagtgttaccatcaatagggttttgtttttgtgggtatttttttttgagacagggcctcattctgacactcaggtaggagtgcagtggcaccaatcataactcactgcaatctcaacttcctgggctcaagcaatgctcctgcctcagcctttgaagtagctggggctacaaacacacaccactaaacctggattatttttatatttccatagagacaaggtctcactacatcacccaggctgataccaaaaggtatttaaagacagacatactttctaagaggtgctgtgaattgtctatagcaagaatatcactgttacttagtttgtgtaaaaaagccacttaaataataaattccatttttaatgacaatatctttttcttcatctaatactaaactaaattattacctttcatcaattgagggttctttttgttgtaaatgaggcttgattcctaacattgggcgaatatttgttgataaggctctgatggtgtaactgatttcattctcccttgtaacatcactgtcatagcctacaataaaaatatacgagtaattctttaagcaataactgagatcaattatgatcttataaattggatacaaagatgttcaacaatatgaaataaattaagttgttataagcaaattatgaagtaatatacaaccagaaaaaacgatgtagaagaatatttaattatatgtaatgatgttttcaaagtattactaagtaataatagcaggttaaaaaataagttcaatatgaccatacttttcttaaaaaaatattagctacatacatcttaggatataccccaaatattagaagaggtgttacctctgtgtggtcaaattatggaggctgtgtttaatttttatggcaaaatacattttctataacgagctgatattactggtatattagaagaaaatcaaaattattttaaaatatgaggtttaataatataaaatttaccttaacagtacttatttaaaattcagatatttttcatttgtagataaataatatcaaagtcataaattcatggcaacctgttgttcttgagtcacaaaatggattttgatgttaaacagactaaaaacagtaccactacaattattcaaacattattattacttgctttaacttccacagcttaaacaagttgtgctaaattttccctatatttttgttcaagtattataaaatgacgtacccccatcttcttcagaatcaatgtcggattcttcactatcacaaggccttttttctcgatagccttccatctcatttgtccacaccattaaagacatatctgtaccgcctagggtaaccaacatgctgtcatcataagtccagcgaacatttgtgacatgtgtactatgggccacatacctcttaaactttccaaatttcccctaaagaggaagaaaattcaaacaatctttctgagaaatttcattatttaaatatttccattatgattttgaattttattaataattaaaaattaatcatttcaagtgcaatgtgttaaaaaaaatgagaaaatactgaaactcagcagaataaaagataccaattcctaaacctgttaaggacaagatctaaaaccagtagtttcacaaaatgctggtaccccaggcaaaactctttaaaaaaccaacttggtattctgcattaaaagcataaaaatgttcttgtatttgactcacccatctcccttttagggatctatgctaagaaatgctatctgtgtaaaaaaatacttaccatggtatttacttatagtagtgaaaaaaattaaataccttaaatgttcaaagtaatagttaattacaatgtatatggaatagtgtatatatattaaagacaatggttatgcagatgtactgttggaaatagatacaataattgagaaaggatacacatgcctatgtacagcatgagtatgttaacaaaaagtaactatcgattgattgctttggtacacatatatttatatacccatgtaaatatctttcatctcaattcattagtgcttttttttgtaagcaatacacatagaaatgtattttccttttaaataacaataaagtttaagttattgttattatggtattagcattaccaagttacataaatttcagatcaaagcatcataaagcaggttttccgttaacatcttttcaaaggtgttaaaatgagagatgtcttatacaaaacacagtgatagcaaaatttgtgaattccctaggaatgacgactctcttttttttttttgatactggaatgcagtggcacgatcttggcccactgtaacctccgcctcctggttcaagcgattcttctacctcagcctcccaagtagctgggaatacagggacccgccaccgtgcccagctaattttttctgtttttaatagagacggggtttcaccatgttgactaggctggtctcgaactcctgacctcaggtgatccacctgcctcggcctcccaaagtgctgggattataggcgtaagccactgcgcccagcaggaatgatgactcttaataattaagtcagggtgagggatctgtcatcaaagcatggcaagaaggtagtttctctaagactgtgtggttcttgctacactaaggtgaaaacataatctgcagatcaatattccagaacctattcctaagggatctacaccatctggaacgctggaagtgaagtttctggcaaatattttagtggaacacattgttaacaactaagactctaccatttacatgtatctaaaacaggaatcagtggaatattttcttgggtgtctgagttttcaatgagaatttttaaacctgtgttttcatttcaatgctgatctaaaaatattaatatgagcagttactcaagatcaccaggaactgaataccacaatatcatttcagtgccatatttcaaatttatctttatgttcatgttggtgccagagtataatatataacttaatttgtgaattaagaaataaatgctgccagataacagtgactcgcgcctgtaatcccaccactttaggatgccgaggcaggaggatcacctgggttcaggagtttgagaccagcataggcaacatctggagaccccatctctacaaaaaaaaatttttttttacattagccaggcatggtggcatgtgcctgtggtcccagttactcaagaggctgaggtgggaggataacttgggtctggaaggtcgatgctgcagtgagccatgattgcgccattgcattccagcctgggtcacagagagagacgctgtcttaaaaaaaaaaaaaaaagaaaggaatgcattgtatctggacttgatatataaattttatttccgtgttaaggaaaagcctaatattttacagtagtttgaacagagggaagtgataaaagaattaagtacttgcacagcacacattagcataggtacgtagaatgccaaagaatctgttggcgaggcccagtggctcacgcctgtaatcctagtactttgggaggtcgaagtgggcggatcacaaggtcaggagtttgagaccagcctgaccaacatggtaaaaccctatctctactaaaaatacaaaaaaattagctgggcatggtggtgcgcgcctgtaatcccagctactcagggggctgaggcaggagaatagcttgaacccgggaggtggaggttgcagtgagcctagatcatgccactgcactccagcctggcgacagagtgagactccatctcagggaaaaaaaaagaaaaaagaaaaaaaaaacttaatatacataagcaggaagtaaataccaattttaagcagaaaatcatcaacaaatgatgctgatgatttaaaatgcacatatattctgctacgaaagcagaaaaaaagaatttgtatgatttggtttcaaaaaaagtcattcattacattaaatcaatggtgcttaattttataagtgtaagtattttctatttaattggttaaaacaacttcaagtttgaagctgtaactataaagagtttatatttattgttaatagtatatatttaattaaaaattgaaaaattattgaagttaatattggggataaaaggaatgtgtctctctctctgacacagggttttgcgctgtcacccagactggtgtgcaatgacatgaccacagctcactgtagcctccaactcctgggctcaagcaatcttcccacctcagcctcctgagtagctaggactacaggcatgtgccacaatgcctggctaatttttttctctgttttgtagagaggaagtcttgctatgctgcccaggctggcctgaaacgcctggcctcaagtgatcctcccacctcaggctcccaaagtactatactgggattataggcatgagccactgtccccagccaagatgtttcttgtaaaagggatattcatattagtcaatattgaaaaacactataggatatgatatataacttaatgtatgggattataaattacaatacttaaaagctatagatatgaaacataattctgaacctttcatattacaacattacatattacatatgtacaattaataacaatgaagtgctatgacaggacattaccttaaccatttcataattgatgatcattaggaaagttaaagaaaaacacatactttagtaggatatctaaataacttcacaaatcccaaatcgtccccggtagctagaaccattttgtcactggtgaggcaagaagcagttacatctgtaacttctccaattactggccaaattccttcacagcataaaccaagtacacttgtccatgatgcccaagcaattttttctacctaaaaatgaaaaacaatgctgtaagtttggattatccaaacctaaagtattaacaaccaaaatgtaaacatttttctttgtagttatgtgtgtcacaagtaaaatgaaagttttaatgaaaaaatagttaaattattagttgtcttggttttgtaactccccagagcctactaattgctgcagaaaaattttaacatagtattattcagaatataattatatatccactgtgtgttctagatgctaagcatacagtgttaataataaaaccgtttctgactttaggataatcaagtaagattcttacagttcatgtttaaatttctaataatgcattatgttttccaactaacccttactagaaatttagaacttttacttatggtctctcccttcattaagacactttcatgttaaatttgttaagcctctcttcctaggccaagataaaaaataaaaaaaaaaaggctaatattgtcaggcacaaaatgcaacacaatttttcttgtttttttttttttttttttttttttttaaagaagcaaaaacagtaatctgccaacaaacttcttaggcatatggattcctaaggacgtggcagatatgcaatactccaatcttagatggcatgtcttctatttgctatttcacgcttcttgtcttttaaggaaagcaactggagcacagctagccgtgcaagtgatttattccttttttttttttttttttaatacagggtctcactttgtcacccaggctggagtgtagtggcatgaacatggctcactgcagcctccgcctcctaggttcaagcaatcctcccacctcagcctcccaagtaactgggactataggcacatgccaccatgcccagctaattttttgtatttttttgtagagatggggtttcagcatgttatccagtctggtcttgaactcctgagcacaagcaatctgcctgcctctgcttccaaagtgttgggattacaggcgtgagccaccatgcccactgactccttttattaatatagtgtttcttccttcacccatgtattctgactcaataaactcaataatatccaatattttaataatttgagaacagacttcacgtgtaactaaacgatagaaagtaggtatcagttttctagccacttttattcacatgaacaacactgcaagcaccactgttgtcctacctccacgctggggatggtttgttttttccctctgggagcttcaaagaataattgttccttagcaccagtgttgacctgtaaaagctttccttcaaaaaaatttttaaaaatatttacacatataaaatacatacaaatatatataccatcagtatgatgtttaagttttatgggaaaaaatcagcttaaatataaaaaccattttctgctgcagtcaacttatagtaagaacattttatttttataattccatattactaagtaactaaattcataagtggtttgatttttgtatatgtatatacataaaaatgatttctttggttatgcatatgtaaaaaattcctagaaacaaatgttaaaatattttttaaagtgtatctgtttaactatatttagaaaaactttatgatgctcaatttatatagttgaatacaatatagttgaatacatgaaacaataacatccttaaaaagagaggatttaaaatacttaacatttatcaaacatattaaactcagtcatatgccatgcattctgctaaaatacaaacatactcattaagttctttatgttatatgattatgactctttttgaagatatatttcatatcaaacaatgagaaaaatgactttaaaatcttcattaacatttctttttaaaaatgtatttcattttttttttttaggaatggggtctcactgtgttgcccaggctggtctcaaactcctgggctcaagcagtcctccagccttggcctcccaaagtactgagattacaggcatgagccaccatacctggccaacatttctatattctatttatgtcaaatttatatgacaaagatcaagacatcttcacaacaatttttttgcacaatatttaaatcactttacaaattaaacaactaatcacttactgtactattatttgaacgatattaggtgaagtattgaaaagtgtaggttgggtgcagtggctcatgcctataatcacagcactttgggatgccaaggtgggaggactgcttgagtccaggagttcgggaccagcctgggcaatatagtgagaacctgtctgtacaaaacatttaaaaattagccaggcatggtggtgcatgcctgtagtcccagcactcaggaggctgagttgggaggatgacttaagcccaggaggttaaggttgtagtgaactgtgattgtaccacagcattccagcctgggtgacagagtgagacctgtctcaaaaaaaaaaaaaaagaaaagaaaaaggaaaaagaaaagtctcaactctatagtattcatcttcagatgtaaaatagtaaaaaataattttgagaataatggttgtttttcccaattctttttaactcatctgttgaatcacttttccgtttctctaatatagctatactaaatcaaatgaaacttttatcaagtattaagttatttaaagtcttacctctaatatcccaatcaatatgggttatgtaactggtagctcctttgcatattcctactcgtttactactcattacattgtatatatctataaagctgtcatgggatgctacagcaagatatttcccagaacctataatagaaacatatttgcttgacattttctatctttggaaatacttttttacactctgcaactagagttaattttccttttctttatggagaaatcttagctgtttcataaattataataaaacagatgtgttaaataacaaatgataacatttttcaagtatattatacttaacaaaataattttttagtgtaacaaattagttcagtgggaagcaaatgtcaaaagctatgtatgatgtagttttgatactttgtatttaacaaaactccctctaaatttagaaaaaaatggaactaaaccaacataagtaaattttgccttaacattagtaattgctacattacagtaggtttgtagtagataatgaatacatggaaattaatggagtaaaatgagtgcaatttcaaaagcattaagaatataacgaaaacagttatccaaccccttttatatcacaaatgaggaaacaaaagctcagagaagcatcctggctcaagtcacacagaaaatttagtaacagaattggcgctaagacagatatttgcaccaatctaacaacagggcttttacctcttgctacactgcctcttctagtaaaaaagttaagttctgagataacataacagttaataaaaattatacattgatacatttatacactgccagacccaagttaatactcaaatacaatttcaatggatcttaccaggtgaaaatcgaatatctgaaatcatatcttttctgtgatgaaaagacacaagatcctctagagtatccgcatttgccattaagaagcttccatcgttgagacctacggctaaagctttaccatcaggagaaaaacagcaacacctcccacctgaaagagaaagagcatattaggcaattttcccttttttctaatttaaagtatgggccaggtgtggtggctcatgcctataatccaagcactctggggagctgaggcaggaggactgcccgcggccaggaggttaagaccagcccgggcaacatagcaagaccccatctctgccagtaggcagagtaggggaaggggcaaggggcaaaggagaaggggcgagggggaagagagaagagggaagggaagacaggtaagtaagtaaataaatagacaggcatggtggcacacacctgtagtcccatttacttaggaagctgaggcgggaggactgtttgagcccaggaggttgagggtgcagtgagctatgattgcaccactgcactccagcctgggttacagagtgagaccttgcctcaaaaaaaaaaaaaatatttgctaaaaaggttgcctctttattatggcttcaaatcaatattaaaaaggagtcgagatacagattaagttttctatagaagtcaatggtatggaattctaagcaggaatgaaactcacttctgaatacaacaaaagcaagtatggatatttaccttaaaagaaattaagttgatgaaaaagaatgagagattttaattaacataaaaagccaatgatatatgtggaagttttgcagagtaggttttacctttgtagcttctttccaaaaaaacagaaatttaagaaataagtcatctttataaaagtaattttttttgagatggaatttctctcttgttgcccagggtggagtgcaatggcatgatctcagctcactgcaacctccgcctcctgggttcaagtgattctcctgcctcaggctcccaagtagctgggattacaggcatgtgccaccaggcctggctacttttgtatttttagtagagatggggtttcaccatgttggtcaggctggtcctgaactcctgacctcaggtgaaccacctgcctcagactctcaaagtgctgggattacaggcatgagccacagcacctggcctatgaaactaaaatatttttaaaaatctaataggccattattaaaggtaggaagatacatctgtatatatacgtttcagaaccatatatgaaatgatatttttattattaatgataaattaatatcgttcattaatgtcattaatgatgttaacattcgtaaaaataagggttagtgctgcattgataaacacaaaaaagggcttaccctaacagcaagggttgcagcaaacatattcaaaagccctaaggattttggtatcttgtatgaaatctgatgaggaaaggacagggtatatacagaatgaaaagttatagcataagttgagaacaagtagtcatttaattatcaagcatacattggaaatgaagaaatctaagatgtgatttctcagatttgagagtcaagagatgatgatgacctggagctgggtggcagcagtggaggtgataagaggaaggatttggatatatttcaaagatagagctggcagaactttgaccaactggatgtggggtgaaaggcgtcaagggcatggttttgcttgagtggtgatgccatttactgagatgggataaactagaggaggaaccaccagtgcttagttctgtacaaattaagttaaagatgcctatgagaagttcaagtgaagacatgaaggagacaatttaatatatgaatccttttcaggagctgcatataatgtttgttatatgtatatctttatttgtgtatattaactatttgacttttctctcctttttctccttcatattttatacaagtttgttggaggttaactttacaattttgtgttaaaagaatattccttgtgttaaaagaatataagaccgtgactaaatttgagaatagcgtaggtcttctctctttaggggtgagaactacttcacttgtaccaagggtagctgcatctctttgggtagaaacataaggttagttctgtgattgtactgaagttcaaatgtgtgtataaaggttcatgtggatcctgactagccagaggggaagactgtgctggttattaatttattgcctctcagttccaaatctgccactttgggcctcacagacttttttgctagcttgccagtagagggagctggagagacactacaaggccaaaacagaagtgactcccttcctccagtgtgctgttttactaacagagcccgggcactggcatgaagggggcctgatggcattcaccagagtggcagccccaactgcctctttcagcaagtttctccaccatcactgtaatggctctaacaatttagctgcaatttgcggacttcaggaagattctctggcaggagtcctcacagttcaatgattttgccctaggttaagctcttcaagcagtggttctgaccattcagctctggcctgctgcctctggcaagcttctccttcaccaagtgactactctcactgttccactgagggctgcaccctctggcaagctttttcgccacaagctcactgaatgttctggtggcagccacaccatttccaaacaggtctgaatcacctttaacttgttcactctcccttagtactagggttgctgctttctatggtggctacctctaaggctttttcagtaggtaatcactttttgctagttagcaattctttttattaaattcccactgttcaaataagccttgtagtctcatcttctgactggacagtgaccgactgaatctaaagtgtgagtgtacatatgaaaagaaaagtccggggagaagcgctggagcagtcctaaatgcagagtgcaggaagaagagatagcactagcaaaggaaacagaaaaagggagtcagtgaagtagagagaagaaacagacacgcacgggttccagagacaagtgaataaagtatttcagaaaaaaaaaagggaatgataaattgtgtcacaaactgctgtgaggtgaatacactgagaaccaggaagtgatcaacagattggcagcaggttaaatggacaagtagggaaaaaagcctaattggagtgggttatggagctactgtcatgtgaacacacagagaagggcgcctcaactattttgaggagttctgctacaaaagagggaagagaaacagaatagtagtgaggtcaattatcacagttccctgttttactcaatgcttattctgctggttgggtgcaggcataaagcaggtagaaagttgagtttaagggaagattaatatagtaagtatcctttaaaattcatagctgagatcattgaaaaattagaaacattttctagttatcaaaattaaaaggggagcagaaacccagagcaaaaaagccacatttggaaggggaggggccaagaaagccaactagaaacagctgtggtcagaggctcccaccaagaagaccgaaaacggcaagtgaatcctgcaccagcaactgaggtatccaggttctctcattgggactgacaaggtggttggcatgacccatggagagtgaggaaaagcagggtggagtgacagcccacctgggagctgcacaggacaaggggagctcctactcccagccaagagaggcagtgagtgattgtgctatcctgcccgggaaaccacactttttccatggatctgtgcaactggtggatcaggagatcccctccgtgagcccatgccaccagttccttgagtcccaagcatagagctgcacagattctcagtggccacttagctacagactgccgaagactaccaagttcctgggggaagggacggctgtcatcactttggctgtctgctgcctcagatgactgagctccctgggcgaggggcagcagacatcactgcagctccagtctgccatttctcctctgatggtgcctgggaaaatagacagtttagacccaggaggaattcaccacagtgcagcacagaggctgtggcagatggtggccagactgcctctttaggtcggaccctgaccataacccctcactgtgcggggcctccctgcaggaatttcagcaactccagccagaggtttgtggacagaactctgatctcccagggactgagctcctagaggggaggggcatccgtggtctccatggatcagcagacttagtctttccctctaccagctctgaggaatctgggcagtcaggacaagtgggatttcccccagtgtaatgcaccccctctgccaaggggtagtcagagtgcttcattaagtgggtcctggatcctgtacctcctgactgggtgagaccaccccaacaggggttgctagacaccttatacaggggcgtttccactggtatcagttcagtgaccctctgggacagagatcccagggaaaggagcaggcagctacctttactgttttgcagcctccactggtgatacctcgaggtgtgggagggacccaggcaaagaaggtctggagtggacctccagcaaacctcagctggaagaggaagaggggtctgactgttaaaagaaaaacaggccaggcatagtggctcatgcctgtaatcccagcacttttgggaggccgaggcaggtggatcatgtggtcaggggttcaagaccagcctgaccaagatggtgaaaccccatctctactaaaaaaaaaacaaaaaaaattagctgggtgtggtagcaggtgcctgtaatcccagctacttgggaggctgaggcagagaattgcttgaacccaggaagtggaggttgcagtgggccaagatcatgccactgcactccagcctgggtgatagagcaggactccatctcaaaaaaaaaaaaaaaaaggagaaaaaagaaaaacaaacaccaacaacaaaagcatcaacaaaaaaagtccctgcaaaaaccccatccaaagttcagcagcctcaaagactgaagctagataaactcacaaagatgagacagaatcaaagaaaaaaaatgctgcaaactcaaaaagccagagtgcctcttctcctccaaattaacacaacacctctccagcaagggcacagaactgggcaaaggctgagatggatgaattgacagaagtaggcttcagaaggtgggtaataatgaattttgctgagctaaaggaacaagttctaacccaatgcaaagaagctaagagccatgataaaacattacaggagctgttaaccagaataaccagtttagagaagaacacaaatgacctgaaggagctgaaaaacacaaccaagaatgttacaatgcaaccacaagtatcaataactgaatagaccaagcacagggaagaatttcagagcttgaagactatcttgctgaaataagatacactacaagattagagaaaaaaaaaaaggatgaaaaggaatgagcaaaacctctgagaactatgggattatgtagaaagactgaacctatgactgactggggtacctgaacagaacaaagttgtaaaacgtacttcaggatatcatccaggagaacttccccaacctaacaagacaggccaaaattcaaattcaggcaatccagagaaccccagtaagatactccatgagaagatcaaccccatgatacataatcatcagattctccaaggtcaaaatgaaggaaaaaaatgttaagggcagtcagagataaagtcaggtcacctacaaaggggagcccatcagactaacagcagacctctcagcagaagccctacaagtcaggagacactaggggccaatattcaacattcttaaagaatttccaactcagaatttcatatccagccaaactaagcctcataagtgaaggagaaataaactcctttttagacaagcaaatgctgagggaattggtcaccaccaggcctgccttgcaagagctcccgaaggaagcactaaatatggaaaggaaaaagtgttaccagccactgcaaaaacacactgaagtacgaaaatcaatgatactacgaagcaactacattaagtgtgcaacataaccagctagcatcacgatgacaggatcaaattcacacataacaatattaaccttaaatgtaaattggctaaatgccccaaattaaaagacagagaatggcatgctgataaagagtcacaacccactggtgtgctatattcaagagatctatctcatgtgtaaagacacatacaggctcaaaataaagggatggaggaaaatttaccaagcaaatggaaagcaggaaaaagcagggagtgcaatcctagtttctaacaaaacagattttaaaccaaaaaagatcaaaaaagacaaagatgggcattgtataatggaaatgggatcaattcaacaagtaaagctaactatcctaaatatacatgcacccagttcaggagcacccagattcataaaacaagttcttagagacctacgaagagacaacttaaactcccacataataatagtgggagactttaacaccctactgtcaacattagatcataaagacagaaaattaacaaagatattcaggacttgaactcagctccggatcaagcggacctgatagatatctacagaactctccaaccaaaaacaatagaatatactttcttcttggcaccacatagcacgtaccctaaaatcgatcacataattgaaagtaaaacactcctcagcaagtacaaaagaactgaaatcataacagtctctcagaccacagcactatcaaattagaacccaagattaagaaaatcatttaaaaccacataactacacagaaattgaacaacctgctcctaaatgactcctgggtaaataatgaaattaaggcagagatcaagaagtcctttgaaaccaataagaacatggagacaagataccagaatctctgggacacagctaaagcagttttaagagggaaatgtatagccctaaatgcccacatcaaaaagctagaaagatctcaaattgacaccctaatatcacaactaaaagaactagagaaccaagagcaaacaaaccccgaagctagcagaagacaagaaataaccaagatcagagcagaactgaaggagatagagacacgaaaagcgcgtcaaaaaatattaatgaatccaggggccggtttttgaaaaaaattaataaaatagatcattagctagacaagaaaagagagaagaatcaaatcgacacaataaaaaatgataaaggggacatcaccactgatcccacagaaatacaaacaaccatcagagaatactataaacacctctatgcaaataaaatagaaaatctggaagaaatggataaattcctggacacatacactctccaaagacggaaccaggaagaagttgaatccctgaatagaccaataacagttctgaaatttaggcagtaataaatagtctaccaaccaaaaagagcccaggaccagacagatttacagctgaattctaccagaggtacaaagaggagctggtaccatttcttctgaaactattccaaacagctgaaaaaaagggactcctccctaactcattttttgaggccagcatgatcttgataccaaaacctggcagagatgcaacaaaaaaaagaaaactccaggccaatatgactgaagaatattgatgcaaaagtcctcaataaaatactggcaaactgaatccagcagcacatcaaagattatccaccacgatcaagctgtcttcatccccaggatgctaggcttgttcaacacacacaaatcaataaacataattcatcacataaacagatctaaagacaaagaccatatgattatctcagtatatgcagaaaaggcctttgataaaattcaacatcccatcacgttaaaaattctcaataaactaggtattgatggaacatacctcaaaataataatgataaacccacagtgagtatcatactgaatgggcagaagctggaagcattccccttgaaaaccagcacaagacaaggatgccttctctcaccactcctattcaacatagtattggaagttctggccagggccatcagacaagagaaagaaataaagtgtattccaataggaagagaggaagtaaaactgttttctgtttgcagatgatatgatagtatgtctagaaaaccccattatctcagcccaaaagcttcttaagctgatatgcaacttcagcaaagtcaaaggatacaaaatcaatgtgcaaaaattacaagcattcctatataccaacaacagaaaacagagagccaaatcatgaatgaattcctgttcacaattgctatgaagagaataaaatacctaggaatatagttaacaagggaagtgaaggacctcttcaaaaactacaaaccactgctcaaggaaataaaagaggacagaaacaaatgaaataattccatgctcatacataggaagaataaatattgtgaaatggccatactgcctgttattagtctgttctcacactgctatgaagaaatacctggctgggtgtggtggctgacacctgtaatcccagcattttggaaggctgaggtgggcggatcacttaatatcaggagttcaagaccagcctggccaacatagtgaaaccttgtctctactaaaagtacaaaaattagccaggcatggtagcgcatgtctgtaatctcagctactcaggaggctgaggcaggagaatcacttgaacccaggaggtggaggttgcagtgagctcagattgtgccactgcacttcaggctgggctaaaagggtgagacttcatctcaaaaacaacaacaacaacaacaataaaaaccctgagacttggtaatttataaaggaaagagatttaattgactcacagttctgtatttctgaggaggcctcatgaaacttacaatcatagcagaaggcaaaggagaagcaggcaccttcttcacagggcagcaggatggagtgagtacaaacaggtgaaatcccagacacataaaaccatcagatgtcgtgagactcactatcacgagaacagcacaggaaagacccgcccccatgattcaattacctcccaccaagtccctcccacaacacatgtgaattcgagatgagatttgggtggggacacagttaaaccacatcattctgaccctggcacttcccaaatttcatgtcctcacatttcaaacccaatcgtgccttcccaacagtccaccaaagtcttaactcatttcagcattaactcaaaagtccacagtctaacatctcatctgggacaaggcaagtcccttccacctatgagcttgtaaaatcaaaagcaagttacttacttcctagatacaatgggggtacaggcattggataatacagctgtcccaaataggggaaactggccaaaaccaaggggttacaggccccattcaagtccaaaatccagcaggacagtcagatcttaaagttccagtgatctcctttgactccatgcctcacatccaggccacactgatgcaagaggtgggttcccatggtcttgggcagctctgcccctgtggttttgcagagtatagcccccttcctggctgctttcacaggctggcattcagtgcctgtggcttttccaggcacatggtgcaagctgtcagttgttctaccattctggggtctgaaggatggttgccctcttctcataactccactaggcggtgccccagtagggactctgtatgggggctccaaccccacatttcccttttgcactgccctagcagaggttcttcatgaggtccctgcctctgcagcaaacttctgcctgggcatccaggcatttccatacatcctctgaaatctaggtggaggttcccaaacctcaattcttgacttctgtgcacctgcaggctcaacaccacatggaagctgccaaggcttgaggcttctgatctgaagcaacagtccaagctgtactttggccccttttagctatggatggagctgctggaatgcagggtaccaagtccctaggctgcacagagtagaggggcccgtggcctggcccacaaaaccatcttttcctcctaggcctccaggcctgtgatgggaggggctgccgtgaagacttctgacatgccctggagacactttccccattgttttgggaattaacattcagctcctcattatttatgcaaacttctgcagctggcttgaatttcacctcagaaaatgagatattcttttctgtcacagtcaggctgcaaatttcctgaacttttatgctctggttccctttaaaaactgaatactttaaacaacaccaaagtcacctcaagaataatttgttgcttagaaatttcttctactagataccctaaatcatctccctcaagttcaaagttccacaaatctccagggctgagggaaaatgccaccagtctctttgctaaaacataagaagagtcacctttgctccagttcccaacaagttcctcatctccatctgagaccacctcagcctggatttcattgcctgtgtcatcatcagcattttggtcaaagccattctacaagtctctaagaagttccaaactttcttacattttcctatctgcttctgagccctccaaactgttccaacctctgcctgttacccagtttcaaagttgcttccacattttcaggtatcttttcagcagcatcccactctactggtaccactttactgtattagtccgttctcacactgctatgaagaaatacctgagactaagcaatttataaaggaaagagatttaactgactcacagttccacattgctgaggaagtcccaggaaacttaacaatcatggcagaagccaaaggagaagcaggcaccttcttcacagggtggcaggatagagtgagtggaaggaggtgaaatgccagacacatgaaaccatcagaagtcattagactcactatcacgagaacagcacgggaaagacctgcccccatgattcaattacctcccaccaggtccctcccacaacatgtaggaattcaagatgagatctgagtggggacacagccaaactatatcactgctcaaggtaatttatagattcaatgctattcccaataaactaccattgacattcttcacagaattagaaaaaaactactttagaattcatatggaaccaaaaaagagcccatatagccaagacaatgctaagccataaaaacaaagctggaggcatcatgctaatcccacttcaagctatactacaaggctacagtaaccaaaacatcatggccactagtacaaaaacagacacatagaccaagggaatagaatagagatctcagaagtaagaccacatatctatgtccatttgatctttgacaaacctgacaaaaacaagcaatggggagaggatttcctatttatttgtttgtttgtattttttctgagacagagtcttgctctgtctcccagactgacgtgcagtggcacaatcttggctcactgcaaccttcacctcctgggttcaagcaattctcttgcctaagcctcccaagtagctaggactacaggcacacaccaccacacctggttaatttttgtatttttagtagatacagggtctcaccatattggccagactggtctcggactcctgagctcacacaatctgcccaccttggcctcccatagtgctaggattacaggaatgagccaccacacctggccagattccctatttaataaatgatgctgggaaaactggctggccacatgcagaaaattgaagctggaccccttccttacaccttatacaaaaattaactcaagatggattaaagacttaaatgtaaaacccaaaactataaaaaccctagaagaaaatctaggcaataccattcaggacacaggtacaggcaaagattcaattatgaaaatgtcaaaagcaattgcaaaaaggcaaaaattggcaaatgggatctaattaaactgaagagcttcctcacagcaaaagaaactgtcatcagaatgatcaggcaacctacagaatgggagaaaattttttgcaatctgtccatctgacaaaggtctaatatccagaatctacaaggaacttaaacaaattcacaagaaataaccccattaaaaggtgggcaaaggacataagcagacaattctcaaaagaagacatttatgcagctgagaaacatattttaaaaagctcaacatcactgatcactagagaaatgcaaatcaaaaccacattgagataccatctcacaccagtcagaatggcgattattaaacagtcaagaaacaatagatggtgctaaggctgtggagaaataggaacacttttactctgttggtgtgaatgtaaattagctcaaccattgtggaagacggtgattcttcaaagacctagaaccagaaacaccatttgacccagcaatgtaattactgagtatatacacaaaggaacagaaatcattctattacaaagatacatgcacacatatgttcactgcagcactattcacaataacaaagacatggaatcaactcaaatgcccatcgatattagactggataaagaaaatgtggtatatatacaccatgggatactatgcagccataaaaagtaacaagatcatgtcctttgtggggacatgatggagctggaagctattatcctcagcaaactaacacaggaacagaaaaccaaatactgcatgttctcccttataagtgggagctgaacaatgagaactaaggatacagggagaggaacacacactggggcctcttgggggacagggaggagggagagcattgggataaatagctaattcacatggagcttaatatctaggtgatgggttgacaggtgcaacaagccatcatggcacacgtttccctatgtgacaaacctgcacatcctgcacatgtatcccggaacttaaaataacataaaataaaaaaaaattttaaagccacatctgccctaacggcatagcagactagtcttgcacctgaacctcctagacaaaactggaattcatgaagggacatacattaattgtactcattatagtactagctttcaaatttttgttaattttaggttccaaaatactcatagtgattaataccattatttcaaaattttaaaaaaatctgatctctgaatcattagcatccagagtaaacacgggttatattgttttgaaaaaaattttcttccctcaaatttcacagagataataaaggtcaactaagcaaaactaatactgtgagaataattcttattctagcttgaagactttttgaacactggaatatgaacacagtattggtttcctagaggctgtaacaaatgaccacaaactgtgtgtcctaaaacaacagaaacccattctctcacagttctggagactagaaatctgaaatcaagatgttggcagagctatgctccgttgtgaaagttcttgggaataatccttccttgtttctctctagcttctggtggttgtagcaatccttggtgctccttggtttataggtacatcactccaatcctctgcttccatcatcacgctgcattctcccagtgtgtctgtgttcctatatcttcacatggccttcttataaggacatcagtcactggatttagagcccaaccaaatctagtatgcctttgtcttaaactgattatatctgctaatactctatttctaaatgaggacacattcacaagtactggggggttagaacttcaacatatcttttcagggggacacaactcaactcacaacaaatacaatagtaatgaattataatttccttctacaaatcataaatttaaagacaatgtaacctggaaatgctttctttaaaataaatattatagcttgctatcaataaaggggctatagccaggcatggtggctcatgcttgtaatcttagcactttgggaggccaaggtgggcggatcacttgaggtcaggagttcaagaccagcctggccaacatggtgaaactccatctctactaaaaatacaaaaataagccagccgtggtggcgcacgcctgtagtccctgttactcgggagactgaagcagaagaatcgcttgaacctgggaggcggaggatgcactgagccaagatcatgccactgcactccagcctgggtgatagagcaagactgtctcaaaaaataaaaataaaaaataaaaaaataaaggtgctatagtccctacaaaaaaaaactttttcaaaaaaatgtccttgaagccatcaaacaagagatagtattatctgatgatacaagagtcacaggaaatttagaactggattatacttatattttcatcattactcagactagtgtatagaatagtgtatagtatagtgtagcgtatagtaagggccttttaggccattggaaaaatttgctcaaaattaattacttttcaactcaataatactatcattaataaactttgctccttaaggttgctttaaaagaaacatcagttattttatttcagtgttttatgctgaaactttcttcattttatgaagtatttacttttaataatttaccaattaaaatactgcacagctatacttatattatgattttgtctttttgtatttcaatatactaaacattaaattatatatttagtttcactaatttttactttaaatttttttgactcatgaatatcttaagaaataaaatagttatttaattacatgcaatttttttggcaaaaactctccaaacagcatattgtcattttcttctagtattacaaccatatctcaggagaaaaaaacagagaaaccttttttttaaaatgtgtctggcaataaagactttatgaaacaagcttatctatcctggcctgggttctccacagagaaggaaaaatcatacttgagaattcacaaacacagggtggctttcataaaccttagattcaaatttattctaattacatgatttatgtaatcccagttaaataaattttcagtggttctcgatggtagcaccccagacacctgaagagagaaacacaaaatctctggaattcatgaagggacatacattaactgtactcattatagtactagctttcaaatttttatgttaattttaggttccaaaatactcatagtgataatctaataccattatttccaaattttaaaaaaatctgatctctgaatcattagcatccagagtaaacacgggttatattgtttttcaaaaaaaagtcctcgatccagacatcatgggattcccacaccctcaatccagacatcatgggattcccacaggtaaagtccaatcaaacatgaacttacaatacaaatttaaaatgcacaagaagatggaccactaggagggagtcagcagaaaaaaaacaaaaaccaaaacaaaaaaacaagaaaacatccaaaagaatggtaagaaaaacacagcaaaatgagatccttggagacaattagattttatattctttatctgaaatgggtagttaagattaaagatagaaaagagtaaatctaaaatataaacaagaagtatgatgttaaaatatctcaggcaaacttgaaaacaaatagaagttataaaaatgacaattatcaaaattaactaatgggtagcttaaaaaacagatgggaatgaactgctataaagagaattaaaaactagaataaagatctgaaaaaatcacacagacgccacatagagacagacagaaaacatgaaatgaacaagacaaggactaatagtgtagaattaaaaaacagaaagttcattttaaacttggaattggccgggggccgtggctcacgcctgtgatcccaccactttggcaggccgaggtgggcagatcatgaggtcaggagattgagaccagcctggccaagatggggaaaccctgtctctctaccctgacagcttcatctgcttcctacaaatgggctcagttctatttacaatatccttcctcagctgtctacccttagtttttagttcttttttgaattttttttagtccccactatgccttagaaaagtttccagttctaaattatgtataatccatagtcacaaaggagagaaaaacttagcttctgtttaccttctatattctttattcaacaagttattggaaatttgctcactttaggcatgatgataggaggtcccataaagccaagactgagtacaattacgtttctctatgtggcaccatgagcaagtagacattgaataaatatttcaacatatttaaagcctttttaaaatgtgcctagttttgctttcttatatttgtaaaggttagaaaactgtgagagcttaatctacgttcaagtgtgagagcctcttaccctttttcagcttccggacagccaacatacaatgactaggtgagagatcccatattcttaaggttttatcatcgcttacagtagcacagatgggcagataagggtgtgtagctaaaccccacacctctccttccatgtgtccctataaagaaaacataggatcaatttagtgtatgtgtgtgtatatttatacacagttttatttagaataaagctaaagataccattcaataatatatgataataggataccgaatagtgagtaaatctatcaaaacttttctgtttatctttgggaaacacaataaaatacctctgtaacaactttagctccacaattaccatataatcaagctacaattaaagttagcttataatcctaaaactttctctgggtggagagaataggaattggctgctctgcaatgttaataattgccacacaggaggtactttcctgcatgagagagtgaggagctccacagacctgctcaccagtgaaactagtaaaaatcaattaaaaaaaaaaaacgcaagcatttaaagtctctgaaaatagttccaaggagatgcaacaaaggaaggaacatttactcaagaaaatctgttaaaatttgttaagaacagtgagagtctacggtatttaaactgagatccactcccttcctccctcctcatctggttggaaactccgagactgatgcaaccaagaacactaggctctctctccccccagctcgcggtcagagcactatctttccaggtagggcaggatgtcagcatttctcaccctgccctcagcctcctgttgctgaggctaaattcttgttgagctcagctgacaggtgggagataacttctgcccagcccctcctccagatggaggctctactttggatgtggtgcctctgagaataatggggtcctggggtaacccaggaaaagctgagactactgtcccctctccccttaccaagtactcagggcctaaagcctgagatactcaaagataaggattccattgacctcactctcaactccagagccctggttcagagattctgcctggagggagaggcaatccagaaatccagatagctcctaatctcttctcaaaggaactgacttcatttacagcagagtgtgaaaaagctcatgcataagtacgtctcaaaaacagtgaaaattgttttgaaaatttcttaactattcttgaatattttttcttctatatggtttttaatatctttccagaatttgtaaaaaatctaataaaaagtaattgggaggagactggtaggctaactggaaatataggctaaaccgtaggccagctagtttgtccaagagaaccagtaaactcgcagagatagctgggaggagcctgcctggagtcagaaacaaacctcaaacactaatctagggaagtatccctttaaaggagcctgaatttgattggtttagcctgtggcacaatttatacccaaggaaaatgttgaaaacaatagagcaatatgctaccaattaaaggagtttaacagttgggtgtggtcagggaaagagacaaagatgagggaacccttcctgaattatgttatacagccattattaccctgatatcaaagccagacaaagatatcacaagaaaactaaataccaatatctcttataaatactgatgctaaaatcctcaacaaaatactggcaaaccaaatccaatacacataaaacattacatatcacaaccaagtgggatttatcccaggaatgcaagattgacaacatcaaaaatcaactaatacactatatcaacagaattaaaaatgaaaaacacatgatcagcttaatagacatagaaaaagcatttgatgaaaatgctccacaaatttggaataaaagggtagtaactcctcaacttaaacttagtaaggagcatctacgaaaaacccacagttaaccttatactcaatggtggaagactagatgctttcactctaagatcaggaacaagacaaggatgttctgttctcaccacttacatttaacaatgtactggaggttctagtcaagactattggacaagaaaaagaaatagcaggcatccagattggacaagaagaagtaaaactatgtgtatttacagatgacataatgttgtacacagaaaaccctaaataatccattataaaactatcagaactaataaatgaggacggcaagtttacaggttatagggttaatgtacaaaatctactgcattttgatacactagaaatgaacaatatgcaatcaaaattaagaaaacagttgtatttataacagcatcaaaaataatggaagttaaaaactcggctcactgcaagctccgcctcccgggttcacgccattctcctgcctcagcctcccaagtagctgggactacaggcgcccgccactacgcccggctaattttttgtattcttagtagagacggggtttcaccgttttagccgggatggtctcgatctcctgacctcgtgatccgcccgcctcggcctcccaaagtgctgggattacaggcgtgagccaccgcgcccggcctgttttattatttacatcttttcactgatatttaattttcagtaatgaaattttagcatacatttttattttttcttagaaacttaagaatggcctaatgaagagtttcagagaaaaataattgccttaggctcaacaaatataccttatataaataaaattaaaaacagactgggttaaattaattacagctggtttttcttttcatgggtcctttattttctgataagaaattactcaaaatattggcaattattccatagaagaatatgtatatttactgacacccaatcatttcattataaccaaattaaaattttttctgtatacattaacagaaaaaaacaaattttttctgtatacattaattttttctgtatacgttaaaatttttttctgtatacattaaattttttttctgtatacattaacaaatatttccctaatttaacattatttttcatcactgtcaacttttggctcttatatattgaaataatcaattgtatgtaaagaaaaaaaaacaaattagcatttaaaattacctgaaccagaagtgttattgggccacttttatccacttctagtatttcaccattctttgtgccaactaaaatatgaccatgtcctaatgatatggcacgtatagatggattatcttccaagagaagacctgaaatgttaaatgaagatgttcttttagacatacagttactataatacaacagtgtatatattgccaattaagctattttgacagtgaaaatcacattacaaggttttctcctgtattttaagtattctaataaatgtactatattaacctcaatcattcaatttagtaatctctaaataagtaccacctatgtcttataagtctatgattctattctcacattccctcctaccattccaacagctatttgtttacctcttcttatattagcccttccttatccatctcctgcccctcttatttacaatattcttattagtaattttaattcaattcaagatatatagtcagccctcagtatccttgggggattgattccaggacaaccacagataccaaagtctatggatgctcaagtccctcatataaaatggtgtagtatttgcatataacccacatacatcattccatatattttttttttcagtagggtggggttgtgccattttgcccagactgatctcaaactcctgggctcaggagttccacccacctgggcctcccaaagtgttgggattacagatgtgggccaccacagccggcccccatgtgctttaaataacttttagattgcttatatctagtagaatgtaaatgctatgtaaatagctgttatactgtatttttaatttatattatttttattgttctattgttactttttatttttctctagcatattttctatttgcagttggttgaatctgaggatatggaacccacagatacagagggccaactatatttatttatgtctacttgtcctagggaggcttcagcaacatattagtaaagatgatagactcaactcatacccttacagagcatacagtgaggaaaacagaccctgtgttaggggcatattgaaatgggagcacagagcagtggaatctaacttttttgagaggagatgagggtgggggaaatcatcctagaaaaaatcaggtttgatatttgaaaaataagtatgttgtcaagtaactggagggggcaggaaggaagaggaaggacatgttttaggaaaaagtaaaaacaggtagaaaggcccagaagtcagagagagtgtggtgctatgccttaaaggaagaaatgcactcaaagacgagttaacgggtgcagcacaccaacatggcacatgtatacatatgtaacaaacctgcacattgtgcacatgtaccctagaactcaaggtataataataataataacaataataataataataaagaaaatgcaccctctgggcccacagcccggaggatggtcggcggacagggagttgggcctgatgctgcccttgcacccttcctcctcttcaaaaaaaaaaaggtaggccaagcacagtggctcatgcctgtaatttcagtgcttcgggaggccaagtttagaggatcatttgagtttgagaccagcctggacaacatagagggaccctggctgcacaaaaatttgaaaatttgctgagtatggtggcaggcgcctttagtcccaactactcaggaggctgaggcaggaggaccacttgagtctaggggttcaaggtttcagtgagttatgattgcaccactgcactccagcctgggcagcacagcaggaccctgtctcttaaataaatcaacaaacaaatggcaaagggaaaaaaggcctgtgaggctacagaaacagggtcaacaaaatgccaaggtgaaacaaaatatcaaagttgcacacaagttcctgactggtgataaatgtgatgttcacatggaaattttctttggaaaattaatgttaaaattaggattcataatcttgtatttcactaatattttaccatgtgtatcatagaaaatagacttttgaaaagatggcaatgattctggtatccagttaagtgatttcttccacttaattctgatgcccaacaagacggaaaaatacatgccatgtgttccacctcagtgatcacacacattaatgagcaattaatctttttttcctatacaaaaaccccactaagtctcaaatcacctttagatcctggggccaatgcagctctttttatagcataggtcttgagacatctttcaaaagagtcatcccaaagagctactataccatcttttcctccagttacaaacccctatggaaaaaaaaaggttcaagttaataaagatctaaatattttttaaaatagtaacctttttccttatattgaaaacttctagaaaaaagaacatagtcaaaagttacagcttgtaaagaacaggaattagcttaagaatccattgtgtttttaaaccgtctacatggaatctgcaacaatatttacagtgaccctaaacattttacttttagatagggctttagaaacacagtttctaaaatctgtaactataagttagatcaccactctcagaaagttacatatatcctcttggagtctacataataacctcatccttaaaaagagaaaacaaaaatggtaactacctgatggatatggtgattatatataaacagccgatttttgacacatagtatgagcttaagaacatgaagttaaactttaaaaaaaaacaaaaaaaacacaaaacaacaacagcagacctggctggcaccatggctcatgcctgtaacacaatactttgacggctgaggtgggagaatagcttaagcccaggagttggagactaccctgggcaacataatctctaccaaaaaaatttttaaaaattagatgggtgtgggtggcacttgcctgtagtcacagctactcaagaggctgaggcaggaggatttcttgagcccaggagctggaggctgcagtgagctatgaccacaccactgcgctccagcttgggtgacagagtgagacactatctcaaaacaaaacactgcagacctatttcattctgtgttcgggagtttgaaaagagaaacaaagaaaggtcaagatgaccctagcccacagactactgctggatagtccaggcaagtagaaaggcagtgttcctttacttcttaaaatgctctacactccaggacaaattttgtttaatttaaaatctctttaggttacttactttttccaatgcatgcatactgaacactggcccatcatgcgctttcactgtttttacaagaaagatgtctctccagatacacacatctcctgtggatgttccagaaaaagccatctcttcagtccatccatacactgcacacatcattgtgtcatttttccccagtgtgcctatgtagccttttcttccaatcaatcctccccctagttcacaaaaaatattatgaaagtaccactttcaaaatgtactcaattataaagaagcaaagtttcttttctactgttgttgttgttgtttgaatagtaaggcatgcaacagtaaggagaattgaaaactacaggtgtctcaatcagtgatgtgggtaacaccttgcataactgcatttagaccataactttttagataaacaaagacctggactaagtctgttttaatcagcccttagcacttttgatgatgttttttaaagtttttattatgacatatttaagaatacaaaaaggcatttaaaaaccccaatacaatgaatgcctatatatccgctgacctacaaaaagatcccaaagtaactgaaatgtcatgccaacctcatctcccttcttcacgctttagtattgtgaatgtgatactgattattctcatgcattcctttacatataaatatttgtgaatttttaagcaatctcatttttcatgttttaaatttttctataaatatcatcctgtatgtattctttgcaacttgctttattcaccaatgatttgttatagagttttttacatgttagaaaactcactttcataaccacatagcattccattatataactataccatggcttatccattttcctattaatggagatttaagttacttccaagtttttgctattaaaagcaatgctgctttaaacattcttgtaaaggcctcttctatacaagtgcaagagtttctctaggaatgcctgggagtagtaatagggtaatgtgcaaaaggcatatcatatagatcagagaggtatcagctcttgccaaactgttttccgaagtttatataccaatgtacactcctacgaacagtgaaaagaattccttgtttctcacctttgggaacagtttgtgttgtcacactagggaatacgaaataccaactgaattttattgtagtttaaatttgcatttctgtgaatattatgctagatcacattttcatatttttactggccatcattacctattgatatctcttgcccatttttcccaattggactcacaaattccttccttccttccttccttcattcaagaaatatattagctgggtatggtggtgtacgcctgtggtcccagccacttgagaggctgaggcaggaggctagcttgagcctgagaggcagaggttgcagtgagccatgattgtgccagtacgctccagcctgcgtgacagagcaaaaccctgtctccaaacaaaaagagagagagagaaagaaagaaaaaagaaatatacatgccaggcactattcaatgtaccaggcatagacttatgaacagaacaggcaagacaacaaaattccctagagcttcatggtgagagacagtcaataaatgtaacaagtaaaatatactgtgctagatgatgatgggtgctttggagaaaatagaagcataaaaaggagacaggaagtgggaggagtccactttaagtagggtggttaaggtaagcctcatcaagaaggtgtatctaaatgaagacttgaaggaggtagcaagagcaagccatgctagaagagtgttccaggcagagggagcagcaagtgcaaaggccccgatacaacaacatgactgaaatcactaagtaacatccagggagacaagtatggagcagcaaagaaggggagacagtaatgggaaatggggttggagaggtctaaggcagtactgcaggccattgtaaggacggcctacttttgctttacatgagatgcaaaacatttgaatagtgaaatgacaagatctggcaattgatttattaagaggttcattctgacttctggattgagaatagatacaagggaggtcaaggatgaaaggagttagaaggctatttcaatcatctgggcaaatggtaaatgtggcagaccaaagtgatatcatagaagatgacgaaaagtggttagattccaaatgtattcagaagactgtcttttctcaacatagaaggcagagtcattagtgaccttgtaagagcagctgggtggagtggtgaggtgaaaaaaactagattagacttttctaaagagaaagagaacataaactgcaaattgaaagtaggaacaactgtttagaggtggtttagcatagaagatgacaaattgatcagcaactggagaataaagttgaaagagggttttgtgtcacttatttaagatggcgaaatcacatcacacttttatgctgaagggaaagtcagtagagaggaacattgatgatacagtagagaaagggtagaagagttagagtgatgtccttgagtagatgagagaaagaatctagtgcacaaatggaagaactggcctttattagagggcaaactatcttctagagcagggtggggaaacaacaggctgaatgccaaatcctgccactacctgtttttgtacaatgtccactagagcaggttagcactctgagctgcagagaccaagtctgtttacttctctgcacccagggtctgcctccctggtttgtggctgtaactagcatctgcccagagtctgggctggtccccacctacaagctagagactctgctaatggcaactgctgggtatctggcagtggaatctcagtctagtagttgccccatttctggtcagctgcccaaattcagaaggttgggctctccaggaacagaaggacacactaggatctatgtgtcactggggtagtgaagctcactacagtttcactcccaaccaaaacctgccagacccattccctggcagacagaatgtctaatggcaactgggtgcaaacagggtaagcagggcaggacagttttctctcttgttctataattacctacataatacccttgattttgtcctttggcctagaaagcctaaaatatttactatctggccatttatggaaaaagtttgccacctttggttcagagcattgacagctgggttttcttgatgatacacacagcataacatgttcctgttacatgaggtcatataatcagctcacattattattgcatcaaaaactttcagaggctccccatccctctgtccctaccatgaatagagttcaaatcccttaggggagagattaataaatcataacttgaaattctcaaagcctagatctggaatgggaggcaagaagccccatgttaacctcaagcctaagtcatctccttcaacctagtttacctaaaactatgcatttagagggttaaacaatagttaggttaagtaagtggatacttatttcccaagtggttaatgaactctgtggatcagaaccccaaaagtaaggaaggttgaaatgctcaccaaagccttaacattcatccttttatgcttcactttcaggtctactatacgtctaatcaaacttaagaaagaaagttattcatttggaagtattttcactgcaagaatatttgctttcttgaaatcttatttcaaacaaattcatagttcttttccaagacagaaatactgagtaaaatcggccttccatgttctcaggttttgcatctgtggatttaataaaatgtggattgaaaatattccttttaaaaaggatgggctgggcacggtggctcatgtctgtaatcccagcactttgggaggccaaggcgggttgatcacctggagtcagggagttcgagaccagcctggccaacatggtgaaaccccatctctgctaaaaaatacaaaaatcagctgggtgtggtggcgggcacctgtaatcccagttactcaggaggctgaggcaggagaatcacttgaacccaggaggtggaggttgtagtgagccgagatcacaacattgcactccagcctgggcaacagagcgagactctgtttcaaaaagaaaaaaaggatggttgctctgtactgaatacatacagactttttttccttgtcattattccctaaacaacagtacaacaaactatttacatagcatttacattatattaggtattatcggtagtctagaaatgactgaaaatatacaggaggatgtgcataaattatatgcaaatactataccattttatacaagggacttgtgcagcatggatttgggtatccttggggaatcctggaaccaatccctgatattttctgatgccatgaggtacaactgtagtatatgctgcgaatttgcaattacaagtgactaaggtgcccaaatgaagtttgtttaagcatgtggaaacaaaattacaaatgtaaaaatacttctttttactttgtaaacgcatatgctgttatctgatgagtttttgataaagtgttaaatccaagactgaaaattaattcatgtcccatgtaatttacaacttgaaagttacttgaacttgggaaatgtcttcactaagtttattcttttctaataatgttttacttcttcctatatttacatattttctctgaacagtttcaatttattgagattttgatgtcacattgatggaatttataagtatactatttagaaaacagacattttttattttatagttacaaatgactaaagtatcatttgtactataaatgatacacttttgtatcatttaatagcatatgagtaattttttttaattttcattttcagtttagactatagaacatgtctttaacagaagaaaaagtctggacataatttgattaatctcatatattgaattcttttgcaagtatgaatactactgtattagtctgttctcacactgttcataaagacatacccaggactgggtaatctataaggaacgaggtttaattgattcacagttccacatggctggggagcctcacaatcatggctgaaggtgaatgaggagcaaagtcacgtcttacatggtgacaggcaaaattgcttatgcaggggaactcccatttataaaaccatcagatctcatgagacgtattcacttccacaagaacagtatggcgaaccgcccccatgattcaattatctctacctggccctgcccttgacacatagggattattacaagtgaaggtgagatttgggtggggacacagtcaaaccatatcaactacataaatgcagccaataaatggcaataaatcttgtatttgtttaaaatgcatcaatacaacagtaaattacttttaaaaaataaactaattttagataattttagatttccagaaaagatgcaaaagtgttacagagtattattctcttatacacttcagtttctactaatgttaacatctttttttttttttttttttttttttcgagacaagttcttgctctgttgcccaggctgcagtgcagtgggagatcacagctcactgcagccttaacctcctgggctcaagtgatccttccaccttatcgtcccaagaagctgggaccacaggtacacaccaccatgcccagctaattttttttttttttttgtagagacagggtctcactatgctgcccaggctgctcttgaacacctaggctcaagtgatcctcccaccttggcctcccaaagtgctgggattataggcatgagtcactgtgcccagccaatgttgacatcttatattaccatagaccatttgttgaaactaagaaaccaacatatttgatacattattattaaatgaactcaagacttcattcagatttcatcagtttttctcctagtgttcctgctctattccaggatgcagtctagggtacacactgcacttagctaaattactttcaaaagcaataatttcttaaaattctatggagtaaaaaagaagcactttcttacctgctttacgccaaaatttcatgtgtttaattccagctgtaattagtttatcaggcacataggggttcatctttacaacaaaaatcttatctttacttcctctgaaataaacatcgaaatgttttagctctgaagattcatcattcctgtattaatctcttgcctaatccataccctatcttgattactctatttacgaatattttactcccacttatctctcaggtttgggctgtgtatttgttcttttgtcatcattttaatatggtaactctgctcaagagaatctcaagagacagaaatggtcaaaactgaactccttttggacagcatctataatacctactatagtactgtgccatagggaatgctatttgtggcatgaatgggttaaagtcaattttaaaacaatactttgttatagcttaagatagcctttccaactacaaaattcctcttaaactattgttaatttgagcattatctatatgctccataaaaagcatttatctatatatttaaagtgctttaacatcgctttaataaatagcaggttaaaatctctgacactgttgactagttcctcctttaaagcattgttaatattactataaaaaatacatgctcactgtagaaaacttagaaaatgaagaaaaatataagaaaataaaaacctataacttctttgtgacatatatgcatatatatcttttttcactttaatatataatataagcatttgaacatggtctccaacagctatataatagcctatcatacagtagaacacattctaactgtacgtggagattttagatagttatatccaatgccatattatagttatatttaaaagtgggttcacaagggataaatctacaaagaaattctgaaatcatttactatgattatattatttattcaatggtaataaacatggaagcaataaaaagttacatatttgcttgatttcaaaattcttttaattaaaaatttttttaagtccaaagtaattctagtattttgcaaatgtgatatcaagtttttttcctaccttgctattgaaagtttctctcctttcttccagtcccagagcacaacagtatggctatcatctatgccaactgatgccaaacgtttcccatccgctgtggaaaattaatgagagagataaactgactattaacattcagaagagagaaaacattcagtatatattctaaacccacatcctatatttaaaatttgataaaataatgttaaatgttaggcatgcatacacctataaaaagaaccagaatttataagggagggagaataaaagtttctcaaatcctctaaatgtatctgctctcatcgcacctgatctccttttcccttatctatccatcaggttgggatgggaggagggagataagaaaaatggaaaaaagagatttaaaaaatagaaggaaagggaaaactaacaaagggatgaagaaaatatttaattaaattcatcataagaaatttactgtaatataagaactttgagtaattatgaaaagttaatcaaatgaaaaacacgtaagttacaacaacatgctgccactaatatgactacttttagtaaaggtcaatcattcaagcaatacataatgaatatattagacaaatcactgcgacaaatgatcagtgaatatcctatgggtgtgcatgtttacaggctgtaaaggctcagaccacaagaaaatattttccattttaccacactttgcaagtctcaattagttcctcactgctccagtggtatttttcgtggtgactcacttagcttgcaattcattttctagtttcttaactgttagcaactctttgaatatatatatatatatatatatttccctctgaactctactatggataatttatcacttcagtcagagcagcaaaagcattaattcactgtttcttaatatagaattctctattaatgtatttcctccctcttcccaattcacaccctagctttcaccgtagatctatctgtagtggtcaaacttttaaacaaacagaaaagcgctaatatgatctgaaattatttttacaagacagtttaaaattgtcactgtataaatatgtctaaaataagtatttcaattctcaactctttctttgctagccttttaccctaaacattttcaaagtttactctggctataaaacggtaagtgagatcagtgccctcccagcgtgggagatgcaaaccacctgtggtaactgagatgaatttaggttgttacgtagataaacatttttatgttaacagaaacatgtaaattttaataagtattaaaactatactcattaagttataattataaactagctagcaaatccacactttcatagtatttgataaggataacagtatacacatttgataaaaactgtgaatgtcacagctaaatgacaagcttaggtaacactgacttagattaaaatgctatgtgttgcctctgcattttgttaattcttactgagacagcaaacagccttacctgagaaatcaacggcactaacaccatactggtggtggccctttaatatggacaatggtttaatggtctctgtatcccatatatgaattgagggatctctaccaacctaaaatagaattatagaagctattaaatacaattaaattatttatttccatatctactaaaaggaaataaaacaagagatttttacagcttgacttatttaccacagaaatttattaaataaaaatttaaagcaaactatataagtgactgatatttttttcttatgcttgttcaaaagctaatgaggctaggctcagtgtttccaggaatgatgtaactaacactatgtgacttttatcatatatttcatcaataaagatgataaatgcttactgaatatctattgtttgtatgctagatacaacgagcaataagacattcaggtaacttttgcaaactcactggaaaaacaggacattatcaatgaaagacaaacacctcttaatagatgcttaatgaacatgaaaaggctgtgcagaatgagtccatagaagagaaggtactggaggtgggccttcagaaagcacagaacttgaatataaagaattctagactaaaataatggggtaaacaaatattcagagggggttaaagtaccaagcatgtctatagacctgaaaaggcaaatctactgcagcactctgtcacttattttttaacttggtttatgatgttcactaatgcacaggtaaactatcaattcttaattattcctctagactcaagtaatcactttctttaaccataagcataaagagatataatatctttgtatatagagacaactcctgaaataattaatagagctgtcaattatagttaattttgagactgatttatttattttttattttttttgagatggagtttcactcttgttgcccaggctggagtgcaatggcgctatctcggctcaccgcaacctccacctcctgggttcaggtgattctcttacctcagcctcccaagtagctgggattacaggcatgtgccaccacacccagctaattttttgtatttttagtagacacagggtttctccatgttggtcaggctggtctcaaactcccgacctcaggtgatctgcctgcctcggcctcccaaagtgctgggattacaggtgtgagctaccgcacctggccgagattgattttataaaaagatataacaaataacactgcaatcagccaatatttcactaagttattcagccaaacattaccagtaactttttagaaaatttttaacattttttgtgggtacacagtagtaccagtaacttttaagttttctttttatataaaaacttctacagaatttgatgcttttgatgattttactgtactactctcttctggttctccagtttccttttttttttttttttttgagacaaggtttcactcctgttgccctgctgaagtgaaatggcatgatgttggctcactgcgacctccgcctcccaggctcaagtgatcctccttgtctcaacttcccaagtagctgggactacaggcatgcaccaccatgcccggctaatttttgtattttttgtaaagatggggtttcactacgtgtccaggctggtcttgaactcctgggctcaagtgatctgccgcctcagttttcgaaagtgctaggattacaggcatgagccacggcgcccagcttccttgactcctactactgagtttccttctcaatttcctcacctgttacttaaatacaaacctctcccaaggtggtctttaattctccagtcttctcattcttcatttttgccctgaggtatctcacttctatagtttcagtggttaaatcaataaatacctcccaagtccttctctcgagcagttacttttcctctgaatccaagacttacattttcaattgtctactggacatctcacctggaaattatgatgatgactaacactcactgagaagtaatttatgtgccagaaactgttctaagcaccttacgaacattgactcatgtaccaatcacaacaactctacgagatgggaacagataacatccttattttaaaggatgaagaaacgaaggtaaagagaggttaggtaatttgccagtagcgaataagtggaaaggcttggatttcaatatcacattccatgaggtatagacagtatttagtataatattgagtactattaaagtacacttagggcatctcactcagggatgaaggggagaagggagaggttgggagagttctcagataggcttagcctaagtcttaaaaggagcagaaattagataaagttggaaggttgaatagaagtggaggggaagagttttccaagacgaaggaactaagtaaaagatgtgaaatagcattatacgtgttggacaaattctatctatctcagaaggcaaaaaaatagtttacaaagaggcaaatagaaagagataaaaaggggagttggagagtcagacttggttaaatgccttgaattgcattgggagtcaacttccaactctgcattaatgttatgccttgaattgcatttaaccaagtctgactctccaacctcccctttttatctcttatcatttatagcttgtggctatttagacagctgtttagacagcctacaggctattaacactaataaatatgaaagaattttaagacttttagaaagattactagtgaatgggaaaaatggatagaggaaaaaagcagaagaccaatggctatagtaatgttttagaaattgtgaagcattgattgtcagtagagatatggaaaaattaaagatgaaaagaatattgaagataaagaataaatatatattcaggtgaaagaatgggtgctacttgaggactgactagctttaggggtgaagaacaagattaacttccaggcttaggcaaccaagttaatacactgctatgttctaagaaggaaacacgaaacgatgaacaggtttggaagggaagattaatcctatttatctccattttagatatgttgaatctgagttgcccacaagacatctaaatcagtgtatttttagtgaattatatctatatatacacacacacatatatacacacacacatacatatacacacagaataatttgtccaattcttatactacattgtgagctcccgatagtggcagccagtctgagttatctctgtgtttccccacaacatttaatgcttttgaataggaagcactcaacaagtatttgctgaattaaacaaaatttccaaattatagtacaattagtcatgttattcgactttccaggtaagtttctttcacattctttcatttccacttaagatcacagttactgacaagaggttattctttgtatttaattctccaaaagacaaaactctctagatttttcatctaaatttctttttttttaaattgttttatttgggaaaagtgcttcttacaaaagggaagctgcaaaatacagagacctctgcaacaattatttgtttttttttcttaaagtgaaagaatgggtgggatccaaggaatcaaaacagtagatggacaaaccaggagcatccctgagttattttcaggaaacaaagcatcaaaacacaaaggaaaaatttccaatcaaggaattcttccaacgacttaactttatctagtctcagggattcccaagccctccccttcagtggaaaagcatgacttattactgcaaacccattactccactacaacaagcaccttagaacagagtttttaatcacatctgtctacctgaaaactcagaggtggaatgaggcaaatacccacaaaaacaaacacaaaaacctgacaacaaaatgtcccaaatgaggacaaacgtttctcagaaagtgcctgtaccggaaaggttagatcgtaaaccattaaatacaactgtgcatccaagacccagtttgtgttaatatataggataaccaggtagttttaacctctacctaccctcctgattagttcctcaactaatgtccataatgcattctaagatttgaacactgtgagttactcatagttctttaaataagctgggtttttttttgccctacttttacagatgctgtaatacacttagaatgctttcccccaacttcccctctgccaggtaaacaactcagctcaaatgtcatcatctctatgagggtttcttcgattctactgggcaaaattaatcattagttcttcattacattgctaccaggctttgtacatatttctacatttaaaaacagggtgattttgccttccaagggacatctgggtactgtctggagacattttaggttgccacaactcagggaagtgggtgttcctggcttctaatgggttgagaccagggatgctgctaaatatcctacaatgcataggtcagcctcccacaacaaataattacctgccccgaaacatcaatagtgctaaggtattgtcataaatatagatcagagaagcttctctgctctatacttaggacactgtatcacaactcagaatgtgagttttcaccatgacaagaagttgtcttatttatctttatattcctagcacatttcttggtacatagaatgtgcttgatgaatgtttttgagtgaatgaaagaaaggaagaaggagagggaaaggaaggagagaaagagcaagtaaggagaggcacaaagaaaggaagaaaaaggaagaagaatgggagaaagaaaaaagggaggagttttctctcctttcaggaaagctatataggaggatgcaagttgatcccttttccacatatcctagctagaaggtatatttacacagtgtttaaagccagacagactgaaggctttaggctttactacctattaactgattgatcttaagcaaattatttaatttctccaaacctaaacctcatcatttgtagactgaaggaaataattttactctcacatggttgaggtgagaataaaataaatatacattaataaactagtaaagtacttacacaaaggaagaatctataaacatcatttcttcccttccttctctaagaatatccatatagagaggtatcagttaagattttctcagggttttttatttcaatatttgtgctttctactttggtaaacctgaatagattactatcatggttgtaaaataaagagacatagtcctttggtttgtcacaggacatttgttaaataatttacatttgttttaggtaactcaacctaaagacaccagatttctagtctttatgttttctctaattttactaatttaaaaaattaatatcatgacagaaataaaacaagccagagctatgagttccaaatttaaattaaaataatatgaattaaaataataaaaactctaaaactgtaggaaaaaagtttggggtaaattttatttataatctgaaaataaaactcattctaaagaattctttactcttcatatcctagaacataaaagagatatgtgattaatttatttaaactcaaacaaaggtgtagcttatctggcttattgtcagtctttcaaacctacctggcctgttgccacgtagtctttcaaaggatgaatagttaggcagagaatatcatcatcatgacccagataaaaacgctgtgtgttttgctgtcgattataaatgacacccactgctgccacatggtacacaatttcaccaatttgagtataaaacagattacttcgacagtcataacctctgtaactaatatagaaaacaaatcatatataattaattttggccttttatctgatcaatacagaatatacaggggagaagtaggtaccctttgggtgaatcattcaatttccagttttacaggatactaaacaattttttttcaagagatggggtctcgctctgtcactcaggctgaagtgcagtggtgtgactgcagttccctgcaattttgaccacctaggctcaaacgatcctcccacctcagccctccaagtagctgggactactgctgtgcgccaccatgcctggctaatttttgtatttttcatagagatggggttttgccatgttgcccaggctggtctcaaactccggagctctacccaccttggcctcccaaagtgctgggattacaggtgtaagccaccatgcccagcctgaacaattaaaaaaataccaccatctcagatccaataaacttttatgaactgctcggactgcaaatagctaaatctaagctataatactgagtgaaaaaaacaaggtagaaaatagtatgtatagtatactaccatttacataagtataatattaaaattgtatactataaaacaaaaacaattgctttttataagtaaaaggtatagaaaagtatatttgtatttgttgtataagtatttctgaaactaagtaacagtaactatctgcagagaggggaaatgatggctgggagggcagaggtgggagaaagattttcaaactgtacccttttatacacattgttggaccatgagaatacaacgtatattccaaaaataagtttaaactacaattttaaaatattatcctcatccaagacaaagtagtcaaatcttaaaatggtcaatataagtctatttatagcaaccttggtttgcacttcaaagaaacccaattcataaaatacaactgcatagaaactactgccattttaacactagagaaaaaatacttgtactaattaaatcctttttcaaattcttgataagtattatcagtcaggtaagaaaacgaatgctgggtgaatggtagaaaagagtcagattggaaaatctgtttctgccaagctgaaatgtgagacccgtattgccagatgttctaagagaatccagaacccgtattttggtgaaattaaaatatttaggcaaaaatgctcatgcaagaagaagtcacaatatcattccaaattagacatattgaggggagatgattatctcttacattttacttaattgtttaaagaggcccatttccatacatatgaaactttcataagacaaatttattttttatttaataaacacttacatagtgcttattatgtgccacataatgttgtaagtcaccactagcattgccttattcactcctcatcagaaccttgtaaggtaggtacttgatatgattcggatatttgtgctgtccaaatcccatgctgaaatgtgatccccagtgtgggatattaggcctggtgggaagtgtttgggtcatgggggctgatccctcatgaatggcttggtgccatccccttggtgatgagtgagttctctcttgattagttcatacaagatctgattgcttaaagagtccagaaacccccttccctttcgatccctttttccttgctctctctcttgctaggtaacacacctgctccccctttgccttctgccatgagtaaaagcttcttgaggcttcaccagaagctgagcagatgctggtgccctgcttgtacagcctgcagaacactgagccaaataaacctcttttccttataaattatccagcttcaggtattcctttatagcaatgtgaaatggactaacacagtactattatctccattttacagacagaaaaaaagagacacagagaggttaagtgacttgtttaaagtcacaaagcacacatatcattaatatattacacacaatgtaatgtattactctaagtcaaatatgcccagttgtcccaacaatgtcctttataatcatcttaaaaatccagatattttaaaaaatatctttcaatttggttttgtctaatgtctcctcatgattagattcaggtgatgtgttttccccatgggcaatgttgtatcctttcggatatgtcatttcaggggatacagtcagttctatcattagagatgttaagctagtaagtgtgaaccaaaattcaaacaaataaatgaaagatagttgttttatacccgtgaacaaagtgtaatcgaatactatttcctggagcccgctctcttcttttagaagtagcacttttttgtttctctttgcactgttctttaagctgaggtagatcttctttgtaaacctttaaaaatgtatacaagtagaaatattcttagaatatatactaataaaggtgttcgtatactcccaatataactttcagacattgtctgaaaacaacagctttaatagtagtcttaaatgaaaagttaattcatgaaatttactccctcggaaagaacaaacaaattcacattttctacatatcacactgacaaatagatacatagtgttccaggaaatttttatacttcataaaagaatattgttaaaggaataaatgtgagtatactatgacaaaatcctataggcaaatagaaggcaagcatacttaatataccaagcatttaatataaaaaaaattttacacaagtgtactctaacactgacagtgggaaaactaatatagtcatacattgcttgagaaattaaagccacaaaagataacaacagatgactaacggggagcaagataaagaagaaattagactttttagagaaaaaccatgtgatatggaaaattacctgtcgacggtaggtgagctgtgtctcttgttcaatttcagaatccagttctggaacatcagacagatctgaatctgattcatcactatgagagtcagccagactttctgtaatttttaaaaatgaaatgttacttgtttaaagaagattcattttcaaaacagcactgaaaaattaatgattaagagctatgtcagttgacatggagacaagccataaaacaatcaaatgaaattacctattcaagtgacacagatgtcagtaaactgtactacagattatcttcctctccactcactgcaaactcaatagctcctttaaatcccttcactggctccccaatgaccgctacatcaaatttaaatgtctgtgcaaatataagtgaatataacctataattaacatgaaaaatagctaaaaatactatatgcaacagatgaattgacattagataatttttgtcaataaaagcatttacaaaatctagatacccatctctcagaggatatattaaatgtttgttttgctattaatataactgtttcttcactcattatttgatagattaaaacgcaatcaaaattactttgtatttcacactctgtgacatctaactttaaacatatagaactaatattttaacttgaaatttctactaataacaaactacactgttaacttatgaggccagattatactttaatataaaattgttatttgggggttactgaagaattatttgacagggaaactgtttagctaatgcatactactcaccttggggtgctatgtgaacagcatctttcagttttctttcaggaataaatttccactgaaagacagagtgatctgctccaccaatagaaataacccactgataatcatgtgaccatctgacattagttacgtgagctgaatggccaatatattttctaaacttggcccctataataaaaatatatctttaaattgataaacaaatgctaaacaaaataccatttcaaacaatttttatatatgaaccactgtatcatccttctatctgaattataaacaaatgggaaaaatgctgactcaaaaattgaacaaatgaatgaatctgtatcaaggaatgcaaatatctcctctgctgattcacaaggaaccacaaaggctgtgaggcattatcttaccactttgagaaaaacctggggatcaactgtttttatattaaaacatttgaatgttttggcctgaggcctttgggcttaagtgaaattcaaaggactaatcaactagaccttacccccattattctcaacccaagcagccagaggatccttttaagacttaagtcatcaagaaaatattagcaaaatgaattcagcaacatataaaaaggattacacaacataatcaaatgagatttatgccaggaatgcaagtttggttcgacattaaaaagtcaatcaatgtaatgcatcatattaatcaaagtcaaatatgcccagttgttccaacaatgtcctttataatcattttaaaaatccagatatttaaaaaaaatctttcaatttgggttttgtctaatgcctcctcatgattagattcaggtgatgtgttttgggtaagggcaatgttgtatccttttggatatgtcatttcaggggatatggtcagttctatcattagagatgttaagctgcatcatttggctatggtggtatacacccaatttctccaataataaaggaatcatttaactttgtggttaattttcttaaaaatctatgtgataatagggatatattttatttatttatttatttatttatttatttatttatggcagagacagggtcttgctatgttgcccaggctggtctcgaactcctgggctcaagcaatcctcctgccttagcctcccaaagtgtcaggattacaggcatgagccaccacatctgacaggaatatatttttagaatatattctctatctcctcctcctggtatgtggcattatacagatattcttattaaaatacacaggatacaatgatgcttagcttccttttgatattgttttaaacactttatattaagttatagaagacttgtatatcaggatgtcaaagccccatcaacgaaattctggagaaaaactttcatcttagtcattaatttaagataactatcatcattaatgcatgagatagaatcaaaactcatctaaagttataatttactgctgcttaatagtaatactgttattttaggaataaattttttatgtagcttaatataagtcactaatttaacttcgcatagttcagcccagcaaagtcctatgaggtaagggctcttatataggaatgcattacttgcctgtcaagagggctttggctactactactacctttgatgcaacccttaagcactcttagacatcagagagtctgaaaagttaaagccagaaattctaacaaataaaattccaagttctaagatctactaatttgttatgttaggacaattaaagagttatctcagcatctgatctgcctataccgagtgatagagagaggtacaaataatcctgtaagtcccttccaaacttttctttgagacttctcaaagaccctcttggataaaccaaggcagctaaacaagaaagttgtaaaataagtctaagagaaaccagtatttttagtcaatgggactgtattaattttttaataaccagtttaatttttaataacttgttctgataaatgggtatcttaaaagtgaacctagatatcatatctttcatgaaatgactttgactcaccaagaccaagttacatgcttccagaattctctgtgattaccccttgtgattatatttatataacactgaaatgtaatagtctatttacttgttaactcctccaataaaactataagctctttaaagacagcagtggtgtcttgtttaatatatatctctggtgcctggtatatagcaaacactcattagatatttgaagaaagagaaaaagaaaggaaaagcaaagattatatttccttttgctctgcttggacttttgagttggaatgctagactgtaatgtaggaaagagtagtaaaggaaactgagagggcatgaacatgattccaacccctataatgcacagaagagggcaaaagtttgatgtgccttaaagaatattagaattgaaatcaaaagactagtgcttgagcatcatttaatagcacggaagtctgagcattccaccaaacctcttttggactccattttctcagttttaaatgtaaattggattatatgctcacaaggtaccttttgattatgaaaactatgataaaaaatgattcagtaataagaatagttaaggcctaaacagtgtatcatcaattagtacaaatatctcagagaaaaaatttatcaagacaaactataatgatcatagaagcttcctaatttaaaagaggatgaaaattcttggtaaggataaagaaatatactaaaatatttgtgtttcaatgattccatttcttttataatgtgttttaatgtgtattttcacacaagggtaatatgatctaaatattttcaatatatggtatcaatatgacaaaagatttttttccatttaactatgttttaatgatattaaacttctagatatgggaataataaatatatgaaaatatctttctgaccctagtaaaagtaagaatttcttaatatacaaaactacactacctataagaaaagaaagagaaatagacttgactacactgaaattaagaactggccaagaaaacacatcattaagaaaataaaaaggcaagccaaaaactgggaaaagatatttgcaaactataaaaattacaaagcatttgtattattagagtatataaagtaattcttaaagatcaataaaagaaataacccaacagaaaataggaaagagatatgaacccatgtttgacagaggagaaaacacagaagaccaaaacatattttaaaagatggttaacctcatttgtagtcagacaaatggaaattaagacctcaatgtgacatcatttacaccaactgggtttgcaaaagttagaaagtatagcaatatcaagtgctgaatcaataggctttgtaaaactggataaccactttggaaaatatttaggtattttcttataacgttcacattctccatgacccagaaatttcactcctagttatttcactcctttgagaaacctgcatttaatatcaaaagatgggaaatgacccaaatgtccaatgacaggagaataaatgcatgaattgcagcatatacttacaacacaatattttgcagcagtgaaaaaaaggcattaaagctacacgcaacaatatggaaaacagcactgaatcagtccccgttataaatttttctttgttagatatttggtttttcctatgaatttcctggaatctaaatgatattttctccaaatataaattttcatttgtcaacaagaagtacagagggggtcttggccattattaacagtgatggaggtgatgggctaacgtaactctgccctcacctctccattctccctgaccctgacctgctcactgtccaccacagcccctatgctgctgcctaggaagagtcctggattctttcagagagattatggtcaagagcaggtgaaactagagaaaaagaggatgataatgaagaaaaaaatatgaagaggggtggaatgctttgggctgaaattaaagtgcagtatgtagggtatatgtggttcatatgatcattctctctttgagctaacttcgtatattttttgtttcaattacaatgattctataacataaactacttctattatttaaagtccacattttgtaaatgctgcacttctaagaagtcacctaatgaatattacctgagtggatatctaaaatatattaatacaccagctacatttttctaagttggactagcaatgcaacttaataattaatctaaaagaaagagtatatttctagtaatactgccaacttcaaggtatgtaattatgtgaattcaattaatacataatcttttttggcctaagtggtctgcaaaacataaaatcttaaaatacttatattaatccattaaaaatgcagtagtcgtattctgtctttcccacttacctagctacaatctcaagctgactcacaagtgcctagaaatagaaatcatccttactagaaaataaattactaacaaaaaagctaacaaatgggaaacaaaaaagagaagcaatttatacttatgtccttgaaggagtgaataatctcttagacaagactaattttcttaggctttggtaaaatattcacacagcagttcaaagaactactacacattttataaatgaaataaaattattgtgcaataatatcgacttctctcttgcaaatgataaaaataatcaataaatcctattcacttgactaagaaaactaagaagattaaagcatttttgtttttgcatagaggtcagtatgtgaaacagtaagtaggagcaacgtctaagaggaagatcatcatgactactactgaatctcacacttcataaccaggcaagtatcatcttaaaatttgttgtgcatggtgactctcatgtcctggctatgtggtgggactcagaaatagggtactttaattgttagatatttagccagtcttttgatatggtttggctctgtgtccccacctaaatctcatctcgaattgtaatcctcatgtgttgaaggagagacctggtgggaggtgatcgaatcatgggggcagtttcccccatgctgttttcgtgacagtgagtgagttctcacgagatctgatggtttaaaagtgttcagcagttcagcatggctggggaggcctcaggaaacttacaatcatggcagaaggtgaaggggaagcaaggcaccctcttcacagggtggcatgaaggagaagtccatgagatcacaggaaaaactaccatttataaaaccattggatctcgtgagaattcactcactatcacaacagcagcatagaggaaactgcccccataatccaatcacttctcaccaggttcctcccttaacacctggagattacaattcaaaatgagatttggctggggacacaaagctaaaccatatcagaccctgctcatgcctgtaatcctagtactctgggaggctgacgtggggagatcacctgaggtgaggactttaagacacagcctggccaacatggtgaaaccctgtctctactaaaaatacaaaaattagctgggaatggtggcacatgcctgtaatcccagttacctgggaagctgaggcaggagggttgatggaacccaagaggtggaggctgcagtgagcagagatcaccactgcactccagcctgggcaacagagtgagaccctgtctcaaaaaaaaaaaaaaaatacaaccatcattgtacagtctgactctatgaaagaattcacgaagtgaaaagaaaaacgtttctttgaaaagaaagagatatagtgcattcataacaacatatgaattcaaaaagaattttctaataaaacttcatgaccaaaataaatgcagcatatgacaataatttttgaattagaaaaatgaaacccttcaccaatcagtgtaattttaaaaaatatgaaatcctttatctcaagactaattttctgcaagaacacgaaagtcttctgtgagagagaggttacttaatattttgaaagaaaaggtaccttttcttaaacatggatatcggaataattttataattccatagtcatcagctgtaactaaaacttggccaatataatttccatctactgaatttatatcgttgatatctgaatacttgggccaaattccatttacttcaaggcctgaaacacatgtccatgaagcccaatgaacaccttttatttcttctgtacttgtcacttcctttcctcctaaaaataaatcagagtcttaatttaaaaagttatttcatttgattttctcaagcctaaactgtactgagaacatagtaaattccaaaatttaatgtatcttcccaccccacttagaggaaaatacataaataggtagataagtttgggttaagagaaaagaaaactaaatgcaagaaatttataaaaagctactacagaaattatactgattcagagacacacattgccttgaatgattagcttagcaggttcaattatgtggagaataaaactgaatcttatttaaaaaatgatacagattagtcataacagggtaagttataaaaaaggtaaaagctatgagaaagtggcaaatcaggtattaaaaaagaagcctaagatacatagttgaggaaaaagagagaactggaaaagaccaagaagaaaggatgagtgtaggataatatatttacattaggtaagaggactttaggacccggtcagtcttcattacatatagactgttaatgaaaaacttttggggagatgcattaattgaattatgcagctaattttatataataggttattggaagatagtgactaattccctaagcgtcacaacaaataaagtactatgcagtggctgggtgcagtggctcacacctgtaatcccagcactttgggaggccgagacaggcagatcactgaaggtcaggagttcaagaccagcctggccaatatggtaaaactccatctctactaaaaatacaaaaattagctgggcatggtggtgggcacctgtaatctcagctactcgggaggctgaggtaggagaatcacctgaacctgggaggcagaggctgtagtgagctaagaacatgccactacactccaacctgggcaacagagcgaaactccgtctcaaaaaaaaaaaatactaataggtaatattttgatgattctgcttttattccatccattcatgcactcactcacttgttaatttatttacttatttgtttagttagagccacgatcttgctctttcacccaggctggagttcactggcacgatcttggctcccagcagccttgaactcccagctcaaatgatcctcccactgcaggtgcatgccaccacaacctgctcatttttttttttttttttggtagacatgtggtctcaccatgttccctggctgttctcaaactcctgggctcaagagatccttccactttggcctcccaaagtgctgggattacaggcgtgaggcactgcacatagcctattcctctcttttaaaatctttggttgcaattctgtttttcaaagttagttagttatattattaatatttgcaaagtttatttgttttttttttttttttgagacagcctcttaatctgtggcatagttggaatgcagtggcaacataacggctcactgcagccttatcctcccaagctcaaatgaccctcccatcccgacctcccgaatagctgggaccacaggtgcataccaccatgcctggctagtttttgtatttttagtaaaggcagggtttcgccatgttgcccaggctggtctcaaactcctgggctcaagctgtcggtccactgtggcctcccaaagtgctgggattacaggcgtgagccactatgcccagcctgcaaagtttatttgagataaacacaaaaaaaatgtattggtcacacacttctagtaattatattcacttaattagttccacccataaaaatggcatttttgactaagatacagtggtactttaccatacactatactcatggtatggtattcaataaaaagagaatctgttttagatcctccagccaaagcagttttaattaagaaccaaaggatttatagtagtagttgccagggactgggagaggtagaggttggtgggggccggggtggatataaggagatataagtttcagttatacaggatgaataaattcagaagatctaatatacagcttgttgagtacagttaataatgctgttactgtatgatatacctgaaatttgctaagagagtggaacttaaatgttctcaccacacacacacaaaaatggtaactgtgaagtggcagatacatcatttagcttgattgtggaaatggtttcacaatgtatctatcaaaacattacattgtaaattttcaatatatacaatttttaatgtcaattatacctcaatagagttgagaaaaaacccaaaaggatttcaatataaggcagccttattgtattatattgtagaattattgtagaatacaataatatattgtattatattgtagaaaagtctacaatgcctgaaatattagctcagatcttctttgatttcctatgatcaaatgtaacttacactctgcttccagtaaaactctaaaatattgtataggtactacaaatctataatttgctagaaattgttacctggcattctataaaaaagtcttttcccatttccatcatttgtctgcaaatatctactgtctgaagaccagtccagatgagtgatgaaactaagggatcccaaacactcgccaacttttttataacgctgagcaactccataaatatcaaccgagctgtcattgcatccaacagcaaggtaagttccatctggtgaatattttaactcatgaattgcctccttcctatctttaatatgtacaacttccgtcatatctctgttaaaaagaaaaaaatgagactacatgaacagaagtcacaacagaattaatgccgtttcaaacatgtctaaaatgaccgtgaagctgtatcaagtgtttataaactataaagtaaacataaataacacaagtagtattaattcagcaacaatacgttgctgaacagaaatacatggaaacaatatatgccagatgtacaggaaaatgctgaatttcagtttctaaattactttaagtacttcagagatccatactaaatttctggagttaataaagaataaaggaaataaagtaatagatttttatggtaaaagaagttctttgtaaatatggagtttatgaaaaatgtttaatttaaacactataattttcaaacaatttttttttgtaaggagctaaatgtgcaaaattacatttaggaaataataaaggatgaattcatctatattacttcagtaatactttttttttttttttgagacagagtctcgctctgttgcttaggctggagtccagtggcatgatctcggctcactgcaacctccacctctggggatcaagcgattctcacctcatacctcagcctcccgagtagctgggattacaggtgcacaccaccatacccggctaatctttttgacgtttttaaatagaacacacattcctcccttagggaccatgttgaccagtgaagtggaactttttttcaatgatgacttcttattgagtatccaaaataatacagatattagtaacaaccaaaagatggataaatatgtagtaaaacaccacggagtttccaaagttgtggagtttgtgggcaggagaaggagaaacagagggagggagaaaaggtagggggaagtaaaaattcttattttcaatcagtgtcagagacttttctccagaaaaattttgcttttattgacttctgttacacatgtgcaagaattaatcttcagttgtatttgagtcactatacagctgtgggcctgttaattacagtacttactgattatgctaaccaacatagtactagaaatagaaatagaaaaatgagccccaagataaatccaagattgtattatttgaagcttctgtacttttttttaaagtttccctggtcaacatcacttctgcctctgcaacttgcaaggtcctcttcctatgcatagactcatacagctgcctctgcatttcccagggactccttcaagttaacattaaatccatataccgtattgccctttgctccatatccatccatccatccattcctccctccctatatggagtaagatttttaagaaaagtctaaggcactatttggcagcttttactttttatgcctcctttatttaaaattttataattataatcttcatgacctgcattaaaatgcttctggaaaattcttcagaagtattttggtattttttatagcatttttgtttagagacttaattgcttccaattaagaagagaagaacgtcttatgtccaaggttttctgttaacatgtccactgctcaccaacacacacacacacacacacacacacacacacggtagaaggtaacagagagagattgtggttgactgattggtattttagtataatatcgctccgtcaatattgtgaattatatgaccactctctcacatgaagagtttctctgacaaatttaaagcaaagacgacaactattagatgaaaatttgttaattttttaaaacattctgaattaagtctctgggagactaatatatgatcactatggtttcttttaagaagcagaaggaggcaaaagcctgggaatactcatacatgaacagttcataatacatcacaaagtaaaggtacagagttgatcagagcatacaaccgaagaatcatttctagctgagtgattctggggagacatatcaaaggaagtggagtagatagctatgatgtctccattttgttctgaggaatgaatgagatttagctcagcagaagataggaaatggaggtaaaggacctgtttcagcagagacaacagtatgtgaaagagctgatggcaagagaaagtattcaagttcagcttgtgacggccactgtagttgaatggacacaaacaaggggactttggtgtgaactcagtctgctgagggagaatcatgaagtgggggcctcatatgtcttattaagatttttggccttaatttgtgaggttaagctaggataagatgtaccagtcaaatcactgatttggttccaacgtaaaaaacaaataaggctgggtgtggtggctcacgcctgtaatcccagcagtttgggaggctgaggcgggcagatcacaagatcagagagagaccatcctggctaacacggtgaaaccccatctctactaaaaatacaaaaaattagccaggtgtggtggcatccgcctgtaatcccagctactcaggaggctgaggcaggaaaatcacttgaactcgggaggcagaggttgcagtgagctgagatcctgccactgcactccagcctgggtgacagggcgagactccgtctcaaaacaacaacaacaacaacaacaacaacaacaaaacaaattaaaggagcatagtaataggatcaaaaccaattaaaaggttactgcagatgatggtttctcagacttcagaaaaaagtgagcttctttaaaatacaatgtagtattatactccatactattataggacgtaatacgtactataggttaaagatataattctaatcttattcacaaaccttaattaaaatgttcctagaaaattaattaggaaagcaaaatcaacaggatgtggtgctgatggattacagatggtgggttcaggagaaagaggtatcaaggaaaacacctaggtttttgcttaggaacatggataatggtgccattaactaggatacggcccatagacagatgatcagtttgggagggatatcatgagttcagttttggaaatgctgagttgcaggtgcctttgagacatccaagtgatgttaaataagtaactggatatgcatagctcgagttttgagataacagctggagctgtgcatccagggtcattaggctatgcgtggtaactgacagcagaggcagaatgagactatctagggagaaaacatagagtaaaaagaagagaaagtctaggcctgagttttgaggacctctaatatttacttgctgggcaaaagataattagcctatgaagaaaatggggctagagaggtaagctgaaaacagaaagagaagaaacacctaaaagccaagggagaaagcattttgagaagcagcaagtggttaagagaatcaaatactgctggaaattcaagctaaatgagaagtgaaaaatgtctcctagttttagggacatagggtacaattagtcagtgtttttcaacataaagctgaaagcagaaggcatataggaatgaggatagaggttgataattagaagaaaagagagaataaagttagacagttttatgagaaatactcctgtgaaagggaggaaagtagaaatgtgatgtaagagagagagactttggtttgaggcatgaaacttaagatgggacacattgagcatgttctaatagggctctttggtgggggtgcaaccaaccatttcatgtgaaaaaataatggacgtacacaaagagttacttttttaaagccaggagacaacttttggaacttactactcccaagacgcagagcagaaaaaatataaataatttgaagaaaaattttaaatgaatgtgtgatttcttcagcaaaaactgtcacgatcccttttaaagttgataaaatgtggtagtaacactgtcagagagagacaagtggctagccattggtagaatctaaaatgacaatttgactaggcatggtggctcgtgcctgtaatcccagcactttcagaggccaaggcaggaggactgcttgatctcaggagtttgagatcaactgggcaaaatgacaagaccacatctctacaaaaaattaaaacattagctaggcatggtggctacttccaagtagtcacagctacttggaagactgagatgggaggatcgcttgagcccaggagttcgaggctgcagtgagctgtgattgtgctactgtactccagcctgggcaacagagcgagaccttgtctcaatcaataaataaaatgacaattttatgtatttacaactattaatagtctatcccataccctgtgggaaaccttactccatcttcagcataattcattagccttgcttatcaagctcttccactattatgaagtctctctcactattcatgagaaggaatgggtgcctctgaggagtttgctgttgataacacagtgtagcttactgtaagtcaaagttccatatgtgtatatataattttctactttaaaatatttgcaagttttcatatgactctatgatatgagcttttttttttttaaacagaaaatggtgggaagtgaggacagcaaaatggtggaaaaggactttccaatgctactccccttgcagaaataccaatttgaatcatccatgcataaaaataccttcacaaaggagatagacacatgaaaatccctccaaaaaattaattaatctaggatctggttttttgaaaaaattaataaaataaatagactgctagctagactaatgaaggagaaaagagggaagaatcaaatagacataacaacaaatgataaaggggatatcaccattgaccccacagaaatacaaacaaccatcagagaataccataaacacttctatgcatataaaccaggaaatctaaaagaaatggataaattcctagacacatacaccctccaaagactgaaccaggaagaagctgaatccctaaatagaccaataacaagttctaaaattgaggcagtaataaatagcctaccaaccaaaaaaggctcatgaccagatgaatttatagctgaattctaccagaaatacaaagaggagcagataccctttcttctgaaatagcccaacaattgataaggagggactcctccctaactcattttatgaggccagcaacatcttgataccaaaacctggcagagaaccaacaaaaaacttcaggccagtatccctgatgaatatcaatgcaaaaatcctcagtaaaatactggcaaactgaatccagcagcccatcaaaaagcttatccaccacaatcaaggaggcttcatccccgagatgcaaggctggttcaaccaatgcaaatcaataaacgtaattcatcacataagatctaaaaacaaagaccatatgattatcttaataggtgcagaaaacgcctttgataaaattcagcatcctttcatgttgaaacctctcaataaactagatattgaaggaacatcccccaaaataataagctgtttatgacaaacccacagccaatatcatactgaatgtgcaaaagctggaaacattgcccttgaaaactggcacaagacaaggatgtcctctcttcaccactcctatttaacacagtattgaagttctggccagggaaatgagacaagaaaaagaaataaagcatattcaaataggaagagaggaattcagattgtctttatttgcagatgacatgatcctatatctagaaaactccatcgtctcagcccaaaagcttcttaagctgataagcaactccagcaaagtctcgggatataaaatcaatgtgtaaaagtcacaagaattcctatacaccaacaacaggcaagcagagagctaaattatgaatgaactcccattcacaattgctacaaataaaatacctaggaatacagctaataagagaagtgaaagacctctttaaggagaactacaaaccactgcacaaggaaataaaagagaacacaaatgaaaatattccatgctcctggataggaagaatgagtatcatgaaaattgccatcctgcccaaagtaatttatagattcaatgctattcccattaaactaccactgatattcttcaaagaattagaaaaaaactacttaagacatcatatggaaccaaaatagagcccgtacagccaagtcaatcctaagcaaaaagaacaaggcaggaagcatcacgctactgaacctcaaactatattacaaggctacagtaaccaaaacagcatgatgctggtataaaaacagatgggtagaccaatggaacagaatagagaattcagaaataagaccacacatctacaaccatctgatcttcaacaaacctgacaaaaacaagcaagggggaaaggatctcctattcaataaatggtgctgggaaaactggccagctatatgcggaaaactgaaactggaccccttccttacaccttatacaaaaattaactcaagagggattaaagacttaaatgtaaaacacaaagttacaaaaaaccctagaagaaaatctaggcaatgccattcaggtcatgggcatgcgcaaagatttcatgaagaaatcgctaaaagcagctgcaacaaaacaaaaattgacaaatgtgatctaattaaactaaagagcttcggcacaataaaagaaactatcatcagggcaaagaggcaacctacagagtgggaaaaaatatttgcaatctatccatctgacaaaggtctgatatccagagtcaacaaggaacttaaacaaatttacaagaaaaaaacaaccccattaaaaagtgggcaaaggacatgagcggacactttttgaaagacaacatttatgtggccaacaaacatatgaaaaaaagctcaacatcactgattattagaaaaatgcaaatcaaaaccacattgaggtaccatctcacgtcagtcagaatgacaattattaaaaagtcaataaacaacagatgctggtgaggttgaagagaaataggaatgcttttacactgttggtgggaatgtgaattagttcaaccattgtggaagatggtgtggcgattcctcaaagatctagaaccagaaataccatttgtcccagcaatcccattactgggtatatacacaaagaaatataaatcattctattacaaagatgcatgcatgtgtatgttcactgcagcactattcacaataacaaagacatggaatccacccaaatgcccatcaatgatagactggataaagaaaatgtggtacatgtataccttggaatactatgcagccataaaaaggaaggagatcatgtcctttgcagggacatggatggagcaagaagccattatcctcagcaaactaatgcaggaacagaaaagcaaacaccacatattctcgtttataagtgggagctgaacaatgagaactatggacacagggagaggaaaaacacacactgaggcctttgggggtggggtgaggggagggggagcattaggaaaaatagctaatgcatactgagctcaaaccatttatgcctagtgctccattactggaacgctaagcttgtgggaattatttatatcttactgctcaaggtcattgccaaggtctgatttttcataaaaaaaaatttgcaacccctggcataaatgggttaatacctaggtgatgggttgataggtgcagcaaaccaccgtggcacatgtttacctacataacaaacctgcacattctgcacatgtactttgtaacttaaaataaaaattaaaataaaaaaaatgttcataagagctaagaaaacatggtgagagattatagaatctgtatgtaacacagcaataaggaaagacatatttgaagaaggagggaaggacagttttacattactcatgtcaccccttccctcaagccaacctaagtgtccatcaatgtacacatgaataaaaaagagatatactattcattcttaaaaaggaagaaaattagctgggcacaggggctcatgcctgtaatcccagcactttcagcagctgaggcaggaggattgcttgaggccaggagtttgagacaagcctgggcaacacagtgaggcccaggctctacaaaaattttaaaaaataattttagaaaaggaagaaaatcctgtcatttgctaccacacggatgaacctggtgcacattatgcttagtgaaataaaccaggcagagaaagacagatactgcatgatcttgcttatatgtggaatctaaaaaagtcaaacatagcagagagtagattggtggttaacagggattaggagtacaggtgggaaatggggagatgttggttaaagagtaccaagtttcagttagaacgagttagtaagttctgaagatatactgtatggcacagtgattagagttaataataatgtagaatatacttgaaaattgctaagacacatcttaaatgttctcaccccctaaagtggttaagtatgtgaggtgatggatatgttaactagcttgatgtaatcatttcacaaagtatatgtataaccaaaatctcatgttgtacgtcgtaaatatatacagtttttatttgtcaatcatgccttaatgaagctggggggacacaaaaataaatttttaaaaaggcagactggttacaaaataattttaaaattgttaacagtttttattatgaagaaaagataagttttaagaagatattgtggctttaccctggcataccaccttatatactaatttaagaatcatgatgtgagattctaattcattctattttcttccaactctaacataacccccactcctggtgcaggtactttaatatgttatgagccgggcacagtagctcacgcctgtaatcccagcactctgggaggccgaggcgggcagatcacagggtcaggagatcaagaccatcctggacaacatggtgaaaccccatctctactaaaaatacaaaaaaaaaaaatagcttggcgtggtggcacgcacctatagtcccagctactcaggaggctgaggcaggagaatcgcttgaacctgggaggcggaggctgcagtgagccgagattgcgccactgtactccagccttgtgacagagcaagactccatatcaaaaaaaaaaaaaaaaaaaagttatgttcagtaatgaatcctgctttaccatatggagaatacaaagcaaatcaagaagaaatagtaaccagataaattcagatggattaagaagaccattttgtgagttagaattttgtggttcacttttaaaggcatttaataatcagaataaccctttcaatactattagcaatgttggattcaggtgctaaaatacagtcttattaggaataaaaactttttcatccagtctactgcattcagtaactgaaagggcaagtaaatgtataactaaaaaaaaatcactacttttgaatgtgtatcagatatgataggaattcttaggtgttttacatgcatcttaaattcttgtaaaacctctataagtgagcactccaattccagtacttccaatactttcagttcttacagaaaagaaaaaatgaagctgatcatgaatattaattattattcataagtaatgaccaggtgtttctatttattatttctaacctgcaaaactgaagagcagcctccaaagaaattaaacaaccaatgagaaaaagaacagatgtttaatcttagatgatgatagttacagagattccagaatcaatagatcaaatcagtgcccaaattataacagtatggatagcccaacagggaggtttcgtagtctttcatctctcttcaagaagctgtttcagcatgacaaaataaagtaatatgacatatttatagagctctgtggaaaaagctttaatttatattcaaatgttatattcatttttttaaaatatgaggtacctagagtagtcaaattatgtctttcatagagacccagaaagtagaatgatggttatcatgggcttaggagatggaagaatgggattattttttacagggtacagagtttccatttgggaagatgaaaaagttctgaagctagagggtggtgatggttgcacaacaatgtgaatgtacttaatggcactgaattttacatttaaaaatggttgaaatgtgaagtttatatattatatattttaccacaataaaaaatgttaacttaaaaaccggtctcggaaaggggagtcagcacgtgtagaggctcagaagtacaagaaaacataatgtatctgttcataatggggagatgttagttaaagagtacgaagtttcagttagaattagtgaataagttctgaacatatactgtatggcatggtgatacaggaaaggagtttcctatagatgaaagaaactggggtactgagaaataggctggaaagatgggcactacataccacgtgaaggattatgagctgcatcctaaggacagtacaaagcctttatcatactttagaaataagaagaaagcacacaatgtgttttaaaaggaatcaccatcactgtggagtgaagaaaggtcttgagggaaaccaaacaggaggtaagaagatcagctaagaggctattccaccaatccagttagtagatgacagaagcctacacaagagtacaatggtgagaatagaaggaaggagattaatatgagagctatctcagaagtagactctccagaactctttaattaactacacaggggaggcaaaagagagaactgtgttaatagtttctgaattgagcaactgagcgaaggatcttaccgttcactgaggtagagaagaaagacttcgtaagtacttatcctgtggatctacagcaaatttcttactgactgcatagaattcaattgaatttatctatctataattcaacacaaaatgttaactgctttaccaaattctttaaatttttctaattactcaaacaaaagaagagatggaagcattttttaaagcataaggctgtaaataacaacaacaacaacaacaaccccattttaacagcctcagcttgttaaacggagagggatcattactgaaaatctatactaacaggaaaaggtagttgggacccaaactttatagctcaaaattttagccattaatctattaagcattcttaaccccccaaaccaaggcttctgaatttatttttcggacaaagctatttttataaatatatttttatacttgatgaaattaacatctgaaatatattaataagaaggggaagagaaaaggataaataggtaaaaacaacaagtattatatattctgtatcgctgaagagaaaattacttatattctgtatcactgaagataaaattattatgtgtttctaccctaataccataccttactctaagtacagtgaatgagccatccttcattccaagggcaagatggattccatctgcattgacagctgcacaacgaattggttcttccatattacaccttgctattaatgcatgatctactaggctccatatcctgtaaaatttaatttaaaaaataaaaaaggttagctaatgcatactttagtaaaaatattttggttaaaataatctcatcttaattaagataaatctagatatcttaactatctgttgtgtggcaagaaattcttatctatgaaaatgggaattgttcatgcttaaatgacagaagttgatagaatcttttgctttgaatttttttggcgacatcacgtcactctgtcactcaggttggagtgcagtggcgtgatcatagcttactataaccttgaccctgtgggctcaagcaatcctctagcctcagcctcatgagaagctgggactacaggaatgtgccacccaacctggctatgttttgttgttgttgttgttgttgttgttttggtatccttttagcacagttatagtgtcactgcataataaacacaatgttttgccatctaattgaataacagtaaagtccatgctccactttgccttaaaaatgtaacactcaaagtccaattttatctttttcctcttatgtcaacatgatgagtatgcactggtgataaataataatgtcaccatatggtaatgcacatagcggtcaaaattctgtcaagttgtaaatgtgtcactgaaatttgtaatgagctgaggagcagtgcaaagggatgtgagtataccatctctttcccaacttctcaactctgcatctgtagtgtgatacactgcatttttttttttttttttgagacggagtttcgttcctgttgtccaggccggagtgcaatggtgtgatctcggctcactgcaacctccgcctcccgggttcaagcaattctcctgcctcagcctcccaagtagttgggattacaggcatgcaccaccacgcctgtattttgtatttttagtagagatggggtttctccatgttggtcaggctggtctcaaactcccaacctctggtgatccacccaccttggcctcccaaagtgctgggattacaggtgtgagccaccgcacccagccaatacaatgcatttttaaacaatgcagtacattgattctttcacttttagataggttatttctaccctgaccaaagggagagagtgtgtgtgtagacacacatatgtatatatccttatgtacatacagtctagtgtttaaaactatccaaattcagaatctgttccagaccacaatgctagaaatcaacaacaaaaaagataactagaagatacccattgtttgaaaattaagaattatacttccatataatctaaaagacaaagacaaagatgaactcttaatgatttgttactattttgaagtaagttataaaactgcttaaaatcaaaacttgtgaaatatagctgaaacagtacttaggaggaacttttgggagctttaaatgcatatacagttggccctctgtatccatgggttctgcagctacagattcaaccaaccatggaaggaaaatgtagttaggcctatgatagttgcatctgtactgaacatgtacagactttttttttttgtcattattccctaaacaatatagtataacaactatttacacggcacttacactgtattaggtattataagtaatctagagatttaaagtacagttgacccttgaataatgcaccagttagaagcaccaattcccatgccatcaaaaagccacgtctaatgtttaactctccaaaaacttaactactagtagcctactgttgactggaagtcttatcaataacacaaacagttgtttaacatacactttgtgcattatatgtactaatactgtatacctacaataaagtaagctagagaaaacaattaagaaaatcataaggaagagaaaatataattgttattcattaagtagaagtggatcatcataaaagtctacatcctcatcatcttcacattgtgtaggctgaggaggaggaagagaagaggcttgtcttacgatctcaggggtggcagaggtggaagaaaatccacctataagtggacccatgcagttcaaacctgtgttgttcaaggaataactgtattttggaggatgttcaaattatatatcattttatataatgaacttgaacatccacagattatggtatctgcagggggtcttggaagtaatctcccccaaaaatagcaaggaataactacattataaataaacaaaggctacaatttaataaataggcatctacccccaagacattagaaaaagatcagcaaaactaagattttctaaatgcttttatagtatttttaaaattgttactagtttataggaaaaatgatttttgtatattgttttcatatccagaaaatttgctaaattctcttttcaattccagtaattcatctttggatttttctatatatataaacacatcatatatatatataaccaactgagaatggcagttatttttttcctttccaatctgtgtgtgtgtacgtgtacatatatatacacatacatatatatgctatacacatatacatttggccttactatattgaccaagacttctagtctatagctgaacagaatggtgaaaatagcataactgtcttttttctgatttcaaaggaaaatcttcaatacttcaacattaaatatgatatttgctggtgacattctatgctcttaccacaagggacagcaaaccatgtcctgtgggccaaaccaggcctgctgcctatttttgtacagtctgaaagctaggaataatttttacatttttaaatggttgaaaaaaatgttttaataaaattttgaaacacaagaaaattatttgaaattctactttctgtatctgtaaataaagttttatggaagtataggcatatacttatttggttttttgttttttgtttttttgagacagagtctcactttgtcacccaggctgtagtgctggcgcaatcttagttcactgcaacctccgcctcccaggttcaagtgattctcgtgcctcaccctcctgagtagctgggattacaagcatgtgccaccattccccggcttatttttgtatttttagtagagacagggttttgccatgttggccaggctggtcttgaactcttggcctcatgtgatccacctgcctcagtctcccaaagtactgggattacaggcataagccaccacactcggtcttgttttttgttttttttttttgtttttttaatgtattgtctatggcttacatactgtctttgtatcacactacagaggcagagttgagatactgggaaagagatgatacactctcatcactttggactgcttcttagtacattacaattttcagtgacacagttacaacttgacagaattttgagggctatctgtattaccatatagtgacattttgttattatttttgtttaccaatgtatatattaatactggacttagaatgttacatttttaaggcacaatggagcatggactatactgttattgaattagatggcaaagcattaggtttattatgcaatgacactgtagctgtgctaaaaggatacaaatatacattaccagactaagcactcatcacaatttttccaactcacaggaaagctcagaaaaattagaaaatttaaaacagaatatctcatcacagaagttattcacaaatttaaaaatacaatgaggttgcaagagaagtaagtttctgagtggttgatttgttagccaagcaaggaaagctacttattggtaatgaattacttaaatcattttgaattgcagcagcttaagaaatatgtccagagaaaacagacttgtttaagactgttagcctttctgtgagaacagttgctccaaaagttgagaatattgggaacactaccaataattaatttaaaaacacgacaaataattttgagtggttttccttgattcttcatgggttaacagatgttacagatactactcaattgtttatttggggagtcaatgcaaagtgtgaagtgacaagaatttgcttttatgaatagtctgcatgaaacaactagagacaagaatatattcaaaatcattgagaaaacactaattcaatgcaacctaaattggaatctgctaagatgaattataactaactgatggtgggaaaaaagtatgtatagaaaaaatggcttaaagaaatttacacagattatgaaaacgtaaggggtttaaagcctgtgcttattcattgtattattctttagcacgtacttagtgaagaaaaaaataagactctctcgttttttttaaccaatagcattaatggtgaacttcatttgctcctgtggatttaactaaccactttcagttctgtgaatttattttttgtagttataacagctgctttaatgtctttttatattattattatgctttgaagttctagggtacatgtgtacaatgtgcaggtttgtcacatatgtatacatgcgccatgttggtgtgctgcactcattaactcgtcatttacattaggtatatctcctaatgttatccctcccccctccccccaccccatgacaggccccggtgtgtgatgtcccccttcctgtgtccaagtgttctcatttttcaattcccacctatgagtgagaacatgcagtgtttggtttttgtccttgcgatagtttgctgagaatgatggtttccagtctcatccatgtccctacaaaggacatgaactcatccttttttatggctgcatagtattccatggtgtatatgtgccacatttgcttaatccagtctatcactgatggacatttgggttggttccaagtctttgctattgtgaatagtgccacaataaacatacgtgtgcatgtgtctttatagcagcatgatttataaccctttgggtatatatccagtaatgggatggctgagtggaatggtatttctagttctagatccttgaggaattgccacaccgtcttccacaatggttgaaccagtttacagttccaccaacagtgtaaaagtgttcctatttctccacatcctctccagcacctgttgtttcctgactttttaatgatcaccattctaactggtgtgagatggtacctcattgtggttttgatttgcatttctctgatggccagtgatgatgagcattttttcatgtgtctgttggctgcataaatgtcttcttttgagaagtgtctgttcatatccttttcccacttcttgatggggttgtttttttctagtaaatttgtttgagttctttgtaaattctggatatcagccctttgtcagatgagtagagtgcaaaaattttctcccattctgtaggttgcctgttcactctgatggtagtttcttttgctgtgcagaagctctttagtttaattagatcccatttgtcaattttggcttttgttgccattgcttttggtgttttagacgtgaagtccttgcccatgcctatgtcctgaatggtattgcctaggtttccttctagggtttttatggttttaggtctaacatgtaagtctttaatccatcttgaattaatttttgtataaggtgtaaggaagggatccagtttcagctttctacatatggctagccagttttcccagcaccatttattaaatagggaatcgtttccccatttcttgtttttgtcaggtttgtcaaagatcagacggttgtagatgtgtggtattatttctgagggctctgttctgttccattggtctatatctctgttttggtaccagtaccatgctgttttggttactatagccttgtagtatagtttgaagtcaggtagcgtgatgccttcagtgttgttcttttggcttaggattgtcttggcaatgtgggcccttttttgattccatatgaactttagttttttccacttctgtgaagaaagtcattggtagcttgatggggatggcattgaatctataaattaccttgggcagtatggccattttcagttctgtgaatttttgccagatacagaagcagaaaatcctgacttgcactaacacagcagttaaatggcttagcagtggttaagttttgttgtgattttctgatctcagaaccaagattgaaatttttctgaattaagaagaattgatctctgtctttcttttgagacggagtctggctgtttcccaggctggagtgcagtggcgcgatctcagcttattgcaacttctgcctcccaggttctagcgatattattaaacactgaatggatttggaaattagcttctactgaagactcaatactgttacctaatgaattcaacctaaaattataaggcaaaagcagcacaatgtaatgtgaaacttacattgtggtaaagtcatttgaacaattaatgctatttgaataacaatatcaagctgctttatacacttctgtgctatcaaaacttaaaacaagaagtgaggtctccactgccacacaaatctgcagcagatattttttggagcttaatttatagctttagcaccatacgttggactatcctcctttggcaaatgctgggtcttgtctgtcccttgtgctccaagacaaagccataaacaaaggtcaagtttacccaaaggaaaaatgccttcagggcaaaaagcggctttggcacaatgcccctaaatgcccattttctttcacaaattggctggatagctcctcactatcttgtcagttctttgaagcttttaaggtgattgacattttaactaatatctttagttgttttcattggaagttgttttattccaaataaattgcccaccaataacaggaacagtagtctgaacaattactttttaaagaaacaattgtcctattggcagcagctaggtggcacttggtaatagcagttctacaatgaaaggattatgaatagctcctagcagagcacagagtgaggtaaggtgtagcccccacagtaagtttacagacatatgacctatgccatctcccatcccccaaaaatagactggcacaatgacagtaaatggcatgactgattagcataccataaaaaacatcagtaattatctggaaacaattaggttgagtccccatcttacttcttacactaaaggaagctttacatagattgggagttaaacataaaaatataaccactaatgtactggaagaatatattgaaaatttttaaaaaataattttggggaagatttctctatgatacaatcctagaagtcatgaaagaaaatactgataaattcagctatatgaaaaataacaacaacaacaacaagaatttttgcttacctaaaacaacctacacgaagtaaaaaaaaaagcaagtaacaaactattgaaattacttgcaatttacattataggcaaagagttaacatccataatatataaagagctgctaaaagtaaaggagaaaaagatcaacaaccctacagaaaaaatggcaagaaatgtggaaagtttacagaaaggattctagggaaccacctaacttttaaaattggtaaatatagggaaagaattaagcacctttctgcctttattataaccaggataaacaaataattgatgagaagaaattctctttatagaaatattacagctaacaaatgaataatgagtggtaaatgtaagtattagaatgccaccatttgaaattcttattaaaatgatagatttaggccatgcattctcaacgggggcaatatttcttgaaaggggttaaaaatgaattcttaggggtaaaatatcttaaatattacaatggtttgcattctcttaaggggccacaatacaaaaagagatacatagttgtctgtggtcttaaaatttcaaagacagggtgtgatcaagaaaaaaaatgtaagaaagtgacaatgaaaaaaggttgggaaatactaatctagacgataatcatcaatggctgctactagaaaaaacggagactacacattacataccatcaagcaggagtacatcaccacctaggaaatatcctgaaaattcataactgtatctcatcaaacctctaaatctaactaccaatttacaggatacagggaacacagactatgttaaaatacactatgggtatgcaattagccaaatccagaatgtgggaaacgctgaataaactgtaagaagaacaaaaagggaaggaagaaagctgtagaataaaagagactgaaaagacatatcagcaaacgcaatatatgaagctcatttgggtcctgattttaagaaatcataaaaatattttatgagacaatcaggaatttctatactagctagatacagaacactgtgtgataacagtattgtggtgatgtttgagatatcttttaaagatacaaacagaaatatttacagatgaaatcagggaaaaaaaagacaaactggggtaaacaaatctcaattcctaaatttgatcagtggttctcaaacttttgagtatatcgtagtcacttggaaggcttctgaaatcacaaatcgctcaatttctggtattaggtcctgtaaaaggcctgagaatttgcatttcttacacattcttaggtaatgctgatgttgctcgtctaggaaccacactttgagaaccactatcacagacaaggtttctaatttctttaatatataaacaggtatcattagatcttatttaaaatcaagtagagaaaaagacctatgaactaacagaaaataggcaaacagcttgaacaggtcaaagaaaaaaatgtcctctaaacatataaaaacataacaaccctcaatataagagaaatacatattttcaaatataacaaggtatcatttttcaccttttgggattataattagttctgttaagggtgtgagaaaacaggcactggtaatatattcacaataggtgtataaattgttgctgcctctatgtaaggccttatctatcaaaatttaaaatgcacacatcctttgactactgctaaacatttatcagagatattcatacatgtacaaaatgacaaatgtataatgatattcactgcaagccctgtatttctaaaatacacaaaactggaggaaactaatcttccatcagtaatggattagttgaataaattacagtatatccatgcagtgaaatattatattcctgttaaaaaggaggaggtagttttgtacattctgatatggaacaaactccatatcatatatttgtaagagaaaaaatattactaataattctattaattttcagtattacttatgttcatttgttataccatgagctaataaagttttaatcggagtattttttctttcttttttttttttttttgagatggagtctcactctgttgccaggctggaatgcagtgccatgatcttggcgcactgcaaccttcgcctcctgggttcaagcgattctcctgcctcagcctcccaagtagctgggattacaggtgcccgccaccatgcccagctaatttttgtatttttagtagagacggggtttcactatgttggccaggatggtctcaatcccttgaccttgtgatctgcccgccttggcctcccaaagtgctgggattacgggcgtgagccacagtgcctggccatgttttctttatgtttatctaaggatacattccagcctatggaattagtttataatttgcttacctgaccgaacgatcatcacttccagtcacagccaaaggtttagtaggatggacagcaagtgcccaaagttcaccttcacaatgcccttgcataattagaaaaggtttatttctttcttgcaccacaatttcaaaaatttcactgtcctgtgttccaactagaatgtggtcacctcgccaacacacactccttacagacaaacctagtaaaaagtaaattgtatttaatatataatgctgtaataatgatagcagcaggaggcagacaaatccctatgcagataggggcaagtcccggtgaaagccaaccttcaaacctaagacagtttaaagcctgaaagccaagctacaagtctcagataaatccatggaccaactgagaacgtctcttcccatttggtgcactttcctctgattgatccccacctttcacttactttacacatatttatccttccctaatttttttttatagtgttgtgcccatctttgaggggtgctttttttaagcctttttttactcacaaacccatcagcatgcaatcccccattctgagcccataaaggctccagactcagccatatttggggactgcccacctttgggtggggggttgggggcaggggagactacctgacttcaccccatctcgggtaccctctccattgagagctgttttgtcactcagtaaaactctttgccttgctcacctgccagctgccagtataacttctttcttcttggatgtgggacaagaacttggaactcaccaaacagtgagtacagacagagctgtaaccatgcagcactcccctcctactcaccaagcaacaggagagggagccgctgggcaccacatgcccccatttattgggcaggactgaaagagctattaacatgctgtaacaccccctttggggcttcagggccgctagagtccccaagttttttaggtgccaccacattcccttcaaccagacgccaacgcccaaggcagaagcaggtcacagcacacccggcccagccacaggctgagcatggatcctgcagcaagtgtgggatccagccagagtataagccaagcgcagcctgccaggccaagtgggcagggtacctcctggcgagcctggagcccagtgcagcccgggacaggggcattgcgcccgccatggaggtctccagctggcaaggtagcacccaaaatatcctgtgtcaataattccaatcttcctaaattgaagttaattttgtaccttttatatcttagatgtgagacagaagaaatatgtaagtccttgatctatactcacattttcttcaattgtccatgttgttttctacatgaaatatttgtctttttatgtacctagttcctacccatccttcaagacatgtactcttcttccttctcccttgtagacaactctagccatgtctacttgctcagccagtcttataacacttcagtctgcattgttcaataagtactcaattagtaaattacctttatagaattgtattcttttccttttaataatctttttacttgtctatatttcttcaatatacttataatatcattaaaaagagagaattttactttttctgcctactcctgaatgtcttttgtaatcttaggaaagctaccgtgtttttcagttttctcatgtgtgttacatggccaatataaagacaccgtgtacctcacaatgttcttgtgaggatcagataagaaaaagtctcaaattattttgtaagctttaaagcacaataatgtttagcaaaactaatgaaaataaaataccaattaacatttacatgcttattatgtgctatccttataaacatttgagaaatatcaattcatatataggatcctatatcctaaataatatatttattcttattctccttatttacagtgagggtaaattaccagcccaaggtcacacaacttgtaggtgactggaatatggtttaaacacaaacctgtgggtagcttttatagtaaaaggtcctgttttattacatcaattttttttaatccccaagagaaaaaaaaaaaatcccccaattgctgacaaatttgggtgaaggaaaaatacacctatccacatttaaattatcctgaacaaaagtttcccaaccctcaatatttacccccaactgtttatttagaatagtttgttaaatagttatatttagcattctaatagtaaaatactttcaaaatccaaagatacctaagtgagtacctctcacatctctctataggtcccattataatagatattagacttatgaaagaatctttctcctaacaatgaacctaaactctttacaggcaaaatttctccttaatagaagaattttaatcaaatgcatacagggtgaagaggcaaatataagtcttatttatatttacaaaacttacatttatactcactgaaagaaagagataatctttgggaagtttagagtttgcctagtaataagacatttgttttgttattacctttgtatccctggtctgtttccctgagatcaatcacagtaattggtttaaaagttaaatcccaaagacgaatacaaccatctctgccaccagtagcaaagccttcttcacaagcattcatgctaaaaattcctgcctagaagaggaaataaaataatttaacgacaaatattttttaagaacatctactatatgaaggtagaaacccttttaaaccaatttaacaatattttggtaggatataagaataaacaaatacatcagaaaacacaaaagaaaatctagaagtaagtccataagaacttaatacagttgccccttgtggatttgaacttcactggctcacttatatggattttttcaataaatacagtcagctgtgtatccacagttccacattagcaatgaaacccagatcaaaatacaatctttgtgggatgcaaaacccatagatagggagggctttacatatgcaggtttcccagggcaagacttgagtatgtgtagattttggtatctgtggttctggagccaatcccccccaaaatatcaaggcatgactatatataaccaaggtggtatttaattatatggatagaacataaaagaaaataaatttaattcctataccacatgtaaaaatgaattatacatgaacttaaaaaataactatttataactaaatataaaacaagaatattagaaaaattcagaataacatttaggtaactttgggctgtgagagacttttctaggcatggcagatcacccacaagttttaaatttgttcatatgagaaaagatgtaataagcaaagacaaacagattggagaaatatttgcaacatgtatgactgtcaaaagattaataaccctaatattcaaatgaataaaggaaagaaaaccaattcaacaaccacaaaaaatttaaaaagtaaaaaagaaaagggtaggaaaacccaattaatagaaatgtaatgcactgaggacttttctacacaaagatcttgctgttaacaacatggcagctttgtgctatctagctccctttactttgtaagggggacccaaactgctaaaaagctcaaaccaaaaaacgctaagaatttaaacagcagatttctttttaagtttagtaagttatttacacgaaaatttaattgcctctggtaaattagcctcaagagcactagctttattctggtgtggttaatctagaatacttttagattgaagtcaacaagctttttttcaacactactcttcagaaagacaccatactaaagcaatagctttaacaagatactaattatactaatgtaataaatatcaatgagtctaattgatttcttcattgaaatcttgaaaacaaatagataattcagttagaaaagcattttcaagcaaccaaactgactagaaacaatatactatattacgcagtctatcattctaagacaaggttaagtaatacacatgaaagtgtttaaaatacttaaatgtacttacagcatgggctccttgtattgttcgtataagattgattcctttccaaacatatatatccccattgagtgcaccagaatatgttaattcatcccttgcacaggctaggcacagtattgtctgaaggtcacccgtcttaccaaagacacctcgttttggggtcagagcatttccacataaactccagaactaaaaggtatatagtataatcaaattaccaaagaattcttataaaataaagtaaaacattcccaatactttgatgctatattagagcagtgagctaaaaattaactaagaaattgccttatgataaaatagcattcaatgttcagattctcatcctagtgctgtcaaaagctacgttatagcatagctatatagtcactggtttcaattcttatctgtaagaataaggggtttgaatcagattatttttaaaatatgctatgctttccttaggtttctgaaaagaaatctacataaaacttagattaagccaggcacagtggctcatgcctgtaatcccagcattttgggagagcaaggtaggcagatcacctgaggtcaggagttcaagaccagcctggccaatatggcgaagtcccatctctgctaaaaatacaaaaattagccaggtatggtggcgcatgcctgtaatcccagttactcgggaggctgaggcacaagaatcgcttgatatcaagaggcagaggttgcagtgagccaagagtgtaccactgcactccagcctgggcgcagagtgagactccgtctcaagaaaaaaaaaaattttaggttaaaaagttgggaatcggttagcaatgaaaatgaaggtaagtcatcatagactaagaagaagaaaaaggaccaaatctaacatactctctctgatagaaacattaaggataggaaaaaaagagtatgctacagctcacggtaactgcagctcactgtaactataatatttgatattttcaaagctgagcaattgctttgcttgtaaagcttaaaaaaataagatagatgtccatgtggaatgatttgttcattcttgggagaaaataagaagttaaccatgaatcttcattaccagggcttttgttctattaggtggaattaggtaaatttttatagttcacggagagaaatttaaagaaaaaggagttggggggaagtggacacagtggcaaacgcctgtagtctcagcaacttgggaggctgaggtgggaggatggtttgaggccaggagtttgaggctacagtgagctataaatcacacctgtgaatagctactgcactccagcatgggccacatggtaggatcccatctctaaaaaataaaccaaaaaaatgggacagggcagagatacatacattaaatagttctgcataaagaaattaggcccaaagaaaaaattcaactttgtaataagtaattaacatttaaaataatttattatcatatattcttattttaaaatttgaagcctcaaagaactaaaaattatgatcattatctattcaaagatctaatgagtactttaattaaactttgtaatttttaaacttaaaatctccataatttgtgtacataagtggcttgttttctttctttcagcatgtcctaatttgaatccattattttcttctagatcagtgattcccaatgttagcttcacattagaatcacctgggaaatcataaaatgggatgcctggactcccaattgagatgaactgagacagaatctctgaagcatgaagcccaggtacccaaattattttgatgctcagcaagggttaagaactattgttctagaatccaaatcaatattgaccaatagaaatttcagtgatgatgaaaatattacacacacacacacgctttccaatacagtaaccactactagatacataagcatatgaaatgtactgctagtgtgactgaggaaatgaattttaagtttcatttaactaatttgtgtttaaatagctatgtatggttggacagtgcagttctagatcatctctgggaattaatttcctcacatgtattgcctgcaaagagaactatgttactattcatttcttctagcaaagggaaagaaatgtaactcattataaaaatatagtttatttagtttgagataagctttttataaaaacctgaaaatggagcctttagctttacttacaatataaaatagtaagatctccttattcataattaatttgccaatcacttattaagcacttaatatatatcaagtaccatatcaaacacactgtccatcaaagatgaacaagacaaaaataccttcacagtgcttatatcatgtgccttaaagcccagcatacagcctttttggtattaaatatttgtcaaaaaataaatatttactactatccatcaatcaaatcaataccagaataacaaatcaagaattgcagcagcagtgaaagatgcactggagaaaacgtggatggagttaggcatattgaaataaagaatgtgaacacagaaccttaattaattcactaggaattaactgttaccaggaactgttacatcagacagtggaagtaaagcaagttaattccaatttgttccaatgatttaaaagtaactataaacataataatgaatatcaccactgactttacaggcttcaaaatctgagctgtaattataaaacaaaacccagagctttcataagcaaagtaaatagtggctatcaaggctgagagagggacaaggagagatttgttaaaggatacaaaattgtaactagagaggaggaataagttctactactctataccactgtagaatgagtataggtaatatgaatacacagtttcaaatagctagaaggaggatattgaatggtcctaaaacaaagaaatagcaaatgtttgggatgatagctaattaccctaatctgatcaccatacatttttatgtatcaaaacatcactatgtacccatgaatatgtactatcattatttgtcaaaaaaaaaatttaaaggctgaggtcaaatcagggagcaaatatagaaaaaggaaaagcaacactttcagaaagcagaccatgtgttaggcactatgacaagcacttgaatatacactgccgccttatttaatcatcaattctttgaggatggtaacagcagtcacagttttaaaatgtgaaaataaaagctcaaagaggttaaataactcatagcaggttaaacagctaataaatggcaaagccaggtctactcatgttgcttctcccacaccattctatgtaaatgaaaaactcttcatttctttcctattctcaacattttactttgtaagtgaaacatgaagaaacaggatggacacagtaaatcctgcctcactagactacagatttctttatggaatgtggcttattaatttcctattcatacctatattccttacaatagttcaaagcaaataatatatatatttgtttgactgaacataagaacaataaaaacattgccattttaaaaataagtactatcaaaattctgaaagtaggctaaattgttaacagtgcaatatatacttagcagcagagaactaaacgtgactattataaaacaagacccttctagtaccttgatatgttttacaccacagctgacaagtttatttggctggtacaaatcccaagaaatatcaaatatctgtaaacaaatcagattcatgattaaaatacttatttccagaatcatttaaaaatcctgtccaaaagaccaaatggcccaaactcctaatcataaaataatattcctcaataaataataatcaacatcccacacttcaaaatcttatgagaaataaagtaaatttgaaaatgataagaaataaaaagcatttcttcatttctatgaacttcaaacactactggagtaaaatttaacacctctgtttatttttaatttttaaaaaaatttggtccataaataacaagaatggttgaacagaattaggacacgaagggaggtgcttgcataatttctacagaaaagagattcagaatggaacgtgacacttacacagcctagaaataagaaacacctttatagctttctatcactcagaactgtttacataaagaatccaaacactgattttacagtaatttttttcactgtttaaaggtcaaagttaactcaaattttggggagtctccaggcttcattattttctaaaattccataaattctaaatacatgcaaaacattttgttacaaaagcaaacaagcaaaaacccaggtgaaataaaatacgaatgagaaatgtaattaaacaaatgatgaaagaaaaactaacatttaaaaaataattcatttattctgctttctggtagtcgtcatgtttctttgacaccttatcaacctacctctaaaaggtttacatttttggtatactaaaatgtacacttcacattttggtatactccaaaaatttacaaagtgatgctctttagtgataatgaagaaagaatacatattacagttaatatttaacaactcaccataatacagattatatgaaaaacatatcaatgcaactttgaaatattcaaccacaataatactttcaaaaactccattgacagtgtcatattttgtaacgggtctatttatataaattccaaatagtcatgtgcaaaatgctttgatctaagcaggtaagaacatgccagctgtctaataaaatatatccaacattttaataatggtctaaattgtgtgtttgtgtgtgtgtgtgtgtgtgtgtgtgtgtgtaataggcctctctgtgcacctactaaaaaccaaatgtattctccaaaatgcgaatatacacaaaattttctacccaacttttagaatgataaattcccaccaaatacagtcattggccatgcctctgtgctggttcaggttaggattttactacatatacatacacacaaattagacacttttaggagtttacaacttttttgatctacatccataaaaatagtataatatttaattaaaagctggctatgatgtattgtttatatacaatttggaatgaggaatatatattctaacaagtcatcagttaaaaatgttaggtctctaaaaaatgtaatagtaatacgtaattttaaatccacacaagcaacattatttttcaccttaaccataatacatatgtaacaaattagtggtaaaccaaactaaacagaccctaggctcaaaccattcaatttttaaattgagatttgaataatgggtgtctgcatatgtcaaacccatcaaacttcacaccttaaatatgtgcatccctatgtatatcaattatatttcaataaaactgttttaaaaaatgtaaagaaaatacattgtttttactgaagcaaacaccaggttaaaagtcttatacctaatgtagatgatgggttgatgggtgcagcaaacctccatggcacgtgtatacctatgtaacaaacctgcacgttctgcacatgtaccccagaacttaaaagtataataaaaaaaagaaaaaaagtcttatgccaatgctatacatatcaaatcatgtttccaagtcctacaatacatatgtactctaacactttaagactttttacatctgtacaattatttaccaattgtaaaattttaattacatatgacctatctggcaataacaaaatacagaagaataaaatctcctgaactctcttctggtctttcccttccagtactcattagaaatctcaaaagagaatacttactctatctgtatgaccaggagccatagacaacatttttccccttttccagtcccaaacacaaactgcattctttgaatcaagtccaactgaaaccaagcgctgatttatgtccaagaagtccaggaaggaataaaaaggcaaacaaatcaaagagaaactgaattacaaatagcaaagaaattatactcatgggtttttataaacataaaacatatatgcctatattttatagacctcataaaggctgaatgtatttcaccttgttagtgtttccacatatgtatagatcttcacattatgaaacagaagagagacttccatttctaacagtaggattgacaaaatatcctaaatatacctcctaccaaaaactaaaaatactagataaaatgtaaaatcatgtttttaaatggactgatgagctgtcgaaaaattaagaaattttccagtgggaaacctggaggatgagaaaacacctacacctactggactctaaaggcatcgggtgaatacttgtacccctgatttctgtgctgtgggctgaggaagataggagacaaagtctagggcctacctaaggtggggatttgaattgcagaccgcctctgattaaagcagtaaacctctcggaaacaacaaataaccccttcctaaagaagcggaggcaactcatgaagagggagaaacacctccctgaacatttgtaaccacaagcatccttcacatggttgctggcctaaattctcattaaacatgaatccttcaactaggaaatttaattcaaagtagtcttcagggttggctgtgtcttcaagcaacttcaacaatgtggcccaagcaaatataaatcctaaatgaagtaccgcaactttgatctatccctcaaagaattcctacaggtagcaattcaatcaaaataagctaaacaaacaaacaaaaaaaaaagggtcaggtgcggtggctcacactgtaatcccagcactttggaaggccaaggcaggtggattgcttgaggccaggagattgagaccagcctgggcaacacgttgaaaccccgtctctactaaaattacaaaaattagccaggcgtggtgactcacgcctgtaattccatctactcgggaggctgaggcaggggaatcacttgaacccaggaggtagaggttgcagagagctgaggtcgttccactgcactctagcctgggagacagagagagactctgtctcaaaaaatagtaataataagctgaaaaaataaacaaaccaccccacccacacacacaaacacaacaaaataagaaaccatgagtgagaatgggcaagtcacaacaaacagcaaagtcggccttgcaaaaaacatcagatatggcattattagttaaataacataagcttaacgtgagaaataagcttaatgtgcgaaataaaattaaggattcaaaatatctgtatatgagcaaagaatacgagactataaaaagtatccaaggagacctgaagaagcaaacggaacttccagaaacaaaaaataaaataagttaaaaattcaatggaagagttaaatacaagattagcaggagatgaaaagacaaagttgaaaacagaagtggacagtgagaccgaaagtatgagagaggtttaaaaacacaaaagatggacttctagccatgaaggagtatcaaggtctgaacttaccctccccgacccacccctgccataaacagctagaaactgtacagaatacatgaaacaaatgttttcagacatttgcaactggaagtaaagcactgtgaaccctgaaagaggggaaaacaaataaattaagtcctgtaatcacccgagcttccatctaggaggcaatttctagaccatggcacagaaaggtggaatccaaatagagcctggtagacttactaatttggacaaacagagcctggagttcagagaggacaagatgcctagaatttgcagagcaggaaaagagctccagtaaaactatctatagtaagatttgagaatattaatctctgcatgcataggatgaactctatgaggtcatgcaaagaagaaattctagaaaaagaacaattactagagagctaaaagcaaaaaattctcagagatcacaaagggtccagaatcactcaaattctcaataaccagaatgaagatacctctttgaactcgctgggcagtcattaggaatcctgaggtcaggaggagagtgtcataccttaatagtgaaattataccagtaattctagagcaaaagctactctagtgctgcctcatcaaagtttgaaagcaagcttttcacaaagatgaaactgattcatgaggaacttgactatttgccagaacagtgtccatatactttaaaaggatataataaaattacaggtatgtgaagaaacaggaaaatgtgactaataacctggggaaaatcactcaatagaaacagactcaggaaacccagagataattaaaattaggagacatttgctgttaaaattaacattttcaagacaagaattatctcaaacataccaagaataaaaaaagatataaaagaacaacacagaaaactgttacattatctaaaatgaaaatttactccaaaggattaacagcagctcagacaatgatgaaaagataaataaacttgaagacacagcaatagaacccatccaaaataaagtacagaaagaaaaagaaaaaaagaattgacagagcttcaatgacctgcaggaaaatatcaagtggtctaacatacaggtaatcatggctctagaaggagagaaaagacagaggaaaagaaaaaaaaaaactgaagaaataatagtaaaaagtttcctaaattgatgaaaccataaatccacaaatttaagacgttcaacaaatcccaagcaggataatcattcacacagaaaaaacacacaagacacatggcaaacaaattgctgaagccatcgctaaagggcaaattctaaacagcagccagacaaaaaaggacaactgctgtatggaggaacaaagatttaaaaattatcctagactgctcatccaaagtgatgtaagttagaagacaatggacaaacagtttaaagtgctgaggcagaaaaaagtcagcacagaattgtatactaagcaaaaatatcctttgaaaattgagtcaaaacaaagtctttttcaagcaaacaaaagctgagaaaatgaatcatcagtaaacctgcactacaagatatgatcatgaaagttttctcatgcagaagtaaaatgataccaaatagaaacaacttacacatatgagagtgtccaagtggttaaatatgtaagatttttctcattaaaaaagttttaacaactatttacggcaaaataacagttattatggggttttcaaaatatgtagaagtattaataaataaatgacgatagcaccataaacagaagaaaggaaacagcagaatatactttttcatattctttccaaatatacatgaaatatcatgaagatcacaaaaatttggattacaaagtgtcaataaattttaaaaaattaaaatacagagtatgttctctgacaaaaacagaattagagtaacagaatgttatccagaaaatctcccaaatatttggaaattaacaacatacttctaagtaactgaaaggtcacagaagaaataacaagaaaaatgtgaggaaaaacccacaacacatactgtgaaaagtactggtttagagcaggggtcagcaaagtacaactctcaagccaaatcctgtctgtacctatgtttttgtaaataaagttttactggaatatagccacactcattccttcgtgcattgtctatgactgctttcacactgcactgcaatgcagagctgagtagttatagcaaagaccaaatggcccacaaagtttaaaatatttactatttcacttactatagacagcttatcaaatggtggtttggagcacagattctggtagcagattgcctaggtttgaacatcatctcttactagcagggtgactttggacaattatttagcctccctgtaccttactttcttcacctattaaatggggatataaaattacttcacaggggtcactatgagaatcaacatatacactatttaaaggagttagagtgcctgatatatggttaatgttatttaatgtttgcttcatatcattattattattgctattagtttactataaccatagttaaatggggacaaataaaaatacctcacaggggttactgtgaaaattgacatatgtactacttaaaggagttagagtgcctggtatatgactgatgttacataaatgtttgcatcatattattattattactattagtttaccataaccttaattagctttaagaacctacgccctctaactgtccaaatgagaaatgccatctagtacccagttacaatttctgaaaagaaagttttactatttaaactccaaaattggtagaatgaataatttatataaaaagatacagaatacagtttgttatgactctccatcaaatcaagctagcagaaagcccagagaacaagaggagattatttgtacctcctgagagtatttactatttgggaaccaaagggcatcagcaaaaatctagctagaacaaatgtatctacctcttgctatcagaatactgtgtagaggttaaaatttcacaagacaagtatattaagtgaggaatagccagaggggcactgctgttctttctactaatgtctcctctgtctggtatagctcatcaaatacacacagcaaaacacaattggccaaaaactttaaaattccatgtatccaaatagagcctcaatacatctagttctgcaactacaggcaataacaaactagacttgagagtactttctctgtaggcttgataaacatatcatgacccaaaccaacatccctatgcatagattacgcaacaacagacaggacaaggtagaaatgacacagcaaatactacctcctcttctagctttttatcattttttactttatcatttcttttaacccagacttggtaggtgagaaagagaataaagttttcaagcaaaagtaatgcttaatccattaattggaagagagagtcagagacagtttgtagaaaagtaatagtacatttcagaacaaaggacctcaagattagagagatcatggtgctttcaagagagtgccagtaattcaatccaggggagggaaggagtgctaactggaaagcggcaagagacaaggctggagaggtagggcagaagtcaagaggaagagtttttttttgtttgttggtttttttttgatagtgttcgaataaagagagaattcagttttaaatgtagaaaatggaatatctacagaacattcaagtgtgatatttagagttgagaagccagagccactgttagctgatatggaagttaaagtcatgggcctatatactcacccagagaatgtaagtaaagtgaaaagaaaaggctacagactcctgaagaacactgatatttaagaagcagacaaggaaagactcctttaaagataaaaataatcagagagggagaaagaaaaccagataaagaagcctctatccatcttcccaaattcctacctgatcctattcccagacaaaatcttatttgtgtccattaactgaattggaagtatccataaaaaattttagcacatcaaatatttaaataaggagataataatagcatctattccaaagggttgttgggaggattaaatgagataatgcaggcttagcataatacctggcacttggtatatgctcaacacctttagctattatgtttttatgaacttaaaattttaagtaatatgttctcatgaagatctctgataatgaaatacatgtacccaagacttttcctataagttgctcaaagtaagtgaaattaaacactttcaactagtaaaagctatgggcatgatttctccttggatatatagaagaaattcctcagcaatgcaatatattacatttagaaagggcaaatttaaagctaagaagaaaatatctatatttaatgttatagatgcttataattaaaatggcttgaatttcataacaccttaaataagtggtttttaaaaataactttgtaggtttgttttataacattttatgctatgaaataggtattatttcctttaaagaagaaaatgaaattctgacagaacattaagacttgaaaaataatagcaaaaatgggatatgaattaagtttgtgcaattgccaaacactgctatatggtgatataaacctagaagcacattttttttccaaataagagattccaattaagtctttatagatccattaccagaaagtcatctcttactaatatgaacaggaggcagggaaatactgggtagaagaaggtggggtccctggcaagggttccaccctcaagcctggacccctggccctcaatgagaacatgcactcctgttttcccacccgaatgttgcctttgccaaaatcactctggcccacaaccccaaccctgtacccataaaatccccaaactccactggcggaggagcaaaacagcactgtagagaaggagagaagagaagtgtctgcatatcaagaggagtttggcccaggatggtcaggagaagattatcttcccactccatcccctctccagttcgccataccacttagagccacttccattgctcaataaaatcctccatatacaccacccttcaatctgttcgtgtaacctggttcttcctggacgctggacaatccaggatgcactgggtgcaggaacccaaaaaggctgtcacactgactcttcactgagttgttcaacacttaagctgctggtgtcaaagaatattgtttgtaacacacaccctctggggctccagaggttgtgggtaaccttagatgctgccacaggcaagccagcacccaaaggcactcaccccagctctcctgcaacctctcacctgcatgccccactcccacaaggggtttgagctgggcagccaactaaacgagctacacccttgttacaagtcctgcaaaggggtcaagggaactctctcatctcactaccagaaaatcacattaacctatgctactcaaagaagctattcctcagagtaatatataaaaacatctactggctatcatgttcaaggggatagaacacactgtaatttgtttctgtaaaattgaggtctataaaactaattttatgaattaaaaagcagataactaaaattgttctaaaatttaaaatgattttaaagtctaattataacataaaacttttaaagattataaatgaacaacctgcaagatccaactttttactggtaactttaaagtatttttaggtataacaatttccataaaagcaccacaaaaaaagctcttggcttgtttaactttttaaaatcattgactagaagtagatgataatttagaaactgattagtcagttgaatgataattatatcctttgttgtgaactttgattttgtataaaaaataactcataggaattgttccattatattcaataaaaatataattttaatagacaacctttaaggtaactgaaaattgaaatacaggctgggtgcagtggctcaagcctgtaattccagcactttgggaggtcaacaacactggaggatagcttaaggccagaagtttgagaccagcctgggcaccacagtgagatcccatctctaccaaaaaaaaaaattagccaggcatgatggtatgtgcctgtagtcctagttgttcaggaaggtgaggcaggaacattgcttgagcccaagagtatgagttatgatcatgtcactgcactccagcctgggcagcagagcgtgaccctgtctctaaaaataaaaaaataaaattaaaataaaacatatacagctttctgagaaacttaattttcctaagatatcatccatctgtcctgtcaaaataccctatctggaaaagagttacatagaaaaatctgtataataaccatgtaatattccactgaatcaaaatcactttggctttcaaggtaataattaattcaattgagaaagttcttgacatgatgaaataaaaaccccattgttatatatcaacctcccaccccacctacccacctccacctttggacaaataattttcatcaagtgtccaatttaatatttatagatttataatcattttctataatataccttaacatacaatttagaaaaaaatgaaaaactgtcacatacctgtccatctaagtcaaacgccaagcaagctataccatgtgtatgaacatcctttaaaactgatatggtctgcacagtgtatgaatcccaaatacaaatataaggctctttcccaacttgtcctgttgctaccaacactcgttcaggatgcaatgcaaggctgtaaaataaggaaataaataagtagtattattaaaaattgcttatacagattttatagtatttggtagatgtaaaacacatataccagtgtgaacattagactttatccactttagacaatttggattttttaaaaattatttttgttgagacagagtctcgttctgtcagctaggctggagtgcagtggtgtgatctcagctcactgcaacctccatcccgccaagttcaagcaattcttgtgtctcagcctcctgagtagctgggattacaggcacccgccaccacgcccagctaatttttgtatttttagtagagatggggtttcgccacattggccaggttagtcttgaactcctgacctcaagtgatccgcctgcctcagcttccaaaagtgctgggattatggtgtgagccaccacgcccagcaggtaatttggatttaaaataaatagcttctataaaaatccatgctaacagttactacttcatagaatatgtgataaacagttaatgataagctaattatacccttcataatccctgcaatatattgtgtgtaaacttctcaagaaaagaactctcacaagagagcaattggatcacagcaacaaattggtagccttttcctcatttagtattcacctgtttccaagccttctttcccattttactattcctttcactggataaagttagacaaaatcttaatgtctaaatacagcatttagtagcactcctactataacactaattcttaaattataaattccattttaagaaacagaaaggtcacccataattcgcaaaaaaaaatctatgagtctctaaaaacaagacaaagacctagcagttggtaatagtttatgtacatcagcagaaggcggggaaaatataaatttctatttgataattttttctatatgtcaatttacaatatcatatttgcccttgagatgaacaagaaaatcacacctggcatcacggtggagaatcactaaaaggggaaaattaggaggatattaaaacagaatcaaggctgggtgtagcggctcatgcctataatatcagtgctttgagaggccaaggctggaggatcacctgaggtcaggagttcaagatcaccctgggaaacacagcaaaccattgtctctacaaaaaaaaaattttttttaatgagccagacatagcagcatacacctctattcccagctacttgaggggctgaggtgagaagatcgcttgaacccaggagttcaaggaacccaggagttcaaggctgcaatgagctatgactgcaccactgcattccagcctgggcttctgggccagatcctgtctctaaagtaaataaagaagataaaattaacagattggatgcaggggacaaggggaagagaggggtctaagatgactcgggtttctggcttgggtatttgaatggtttggggtggtattcatcaagtcagggaatactaaaggggtaatcaatgggagagaagatgagtgggaataccaggctggttcaacatatgaaatcaacaaatatggcatattaacagaagaaaggtcaaaaaaactcccatatatgtttatctcaatagacacagaaaaattatttgacaaaacccaatcccttcatgataaaaacacataaactagaaactgaaggaaacttcctcaaactgacaaaggacatctacataaacccaaagctaataacatatttaatgatgaaagcctgaaagcaatcccactaagtaaagggaaaaaacaaggatgtcagttcttgtcactcatttaacttattagatattctagccaagaaaaataggccaggaaaaggaacaaaaagtaaaagtaaagatctctattggcagatgatatgatcatatatacagaaaatcctaaggaatccacaaagaaacaaccaaaaaatgaagagctaatatgaattcagcaaggttgcaggatatacgatcaacataaaaaatctattgtatttctatacactagcaacgaacaataaaaaaattaaagaaaataatcccacttacagtagcatcaagaggaataaaacatttaggaataaattaaacaaagtacaagatttgtacactgaaaactacaaaaacccactgaaggacattttaaaagatctaaataaatggaaagacatctcatttctgggcttagaggaatgtaatatttgtaagatggcaatacttctcaaattgatctacagagtcaacataatccttgtcaaaatactagttgtctttcttgaagaaactgacaagctgattctaaaatccagaaagactcaaaataaccaaaactatcctgaaaaacaagaacaaagttggaaaaatcacactttccaatttctaaacttacaaacttactacaaaactacagtaatcaagacagtgtggtactggcataaggatatgcagatcaatcaaacagaatcgtgagtccagaagtaaacccatacatttgtggtcaactgatttcaacaagggtggtgccaagacaattcaatgggggataaaatggtcatttcaacaaatagtactgggacacctgaatatatatccacatacaaaaaaataaatttggacacatacctcaaaccatatacaaatgtcaactcaaaatggatcagaagctaaaataattgttaaaactcttggaagaaaatataggcataaatcttaccaatcttgaatgaagcagtggtttctcagatataacacaaagcattagtgacaaaaaaaaaagcagataaaatggacttaatcaaaattaaaaacttttatgcttctaaggacaatcatcaagaacatagtaatgcaacccagagaatgggagaaaatatttgcagagcatatatctgataagggacttctattaagaatatataaagaattcctacaaatcaacaataaaactataaataatccaatttttcaaacaaataaaggattttaacagacatacccccaaggaagatatacaaaaggcacataaaaagatgctcaacatcaatagtcagcagggaaatacaaatcaaaaatcacaataatataccatttctttttttctttctctttctttccctctttccttccttccttttcttgctttcttcctttctctctctttctctcctttctttctatttatttatttcagacagggtctcactctgtcacccaggctggagtacagtgacacaatcaccactcactgcagcctcgacctcccatacttaagactcatcctcctgctttggcctctcaagtagctgagactacaggtgggtgccaccacacctgtctaattttttttttttttttttgtagagatggggtctccctatgttgcccagactggtctcaaacttttgggcttaagagatcctcccacctcaggctctcaaaattctagtattacaggcatgagccactgctcccagtccacttctataaatatacatatatatacatatatatgtgtatttatttttttttgacacagagtttcactctcattgcccaggctgaaatgcaatgatgcaatcttggcttactgcaacttccgcctcccaggttcaagcaattctcctgcctcagtctcccaagtagctgggattacaggcatgcaccaccacgcccagctaatttttttgtatttttagtaaagacgaggtttcaccatgttgaccaggatggtctcaaactcctgacctcaggagatccacctgccttggcctcccaaaatgctgggattacaggcatgagccaccgcgcctggcccacttctatattttaaaagacagaaaatatgaagtattggcaaggatgtggaaaaagcgtaacccttaaacattgattatgggattgtaaaatgatgtagcctctttggaaaaccgcttggtagctattcaaaaggctaaacaaagttaccgtatgatccagcaattctattcctagatgtattcccaaaaggaatgaaaacatatgtccacacaaaacttgtacacaaatgttcacagcagcatcattcacaaatggccaaaaagtagaaacaatccaaatgtttgactgaatcacgaataaaatgtggtatccacacaacaaaaatgacaaaaggaataaagcattaatacatgctacaacatggatgaaccttgaaaacattacgctaagtgaaggaaaacagatatataagggccacatatcatattaatacattatgaaatgtccagaatatgcaaatccataaagaaagtagattagtgattgccaggtgctggaaggagaggagaatggataaggactgctaatgagcttgggaattttttaggggtgataaatattctgaaattagatagaagtgatggttgaaaaactttgactatactaaaaatcactgaattgtgcacttaaagtgtacattttatgttatgtgaatcatatctcagtttttaaaaagtgaaaaaaaatactgacattactgtctgtacacatatttttagtataaggatttatgcaaagaaaacctttgaagttagacagacatgggttcaaaattctggctctgctcttcacaggcttcttagcaaattctttatcttcatcttgttttctcaccttcaaaaagggcatatatttactacaagtaatatgagggaaatttccccaagcttgaaaactggggaggaaggctgtgtggtggcttgtgtctgtaaacccagtgctttgggaggctgaggcaggaggatcacttcaggctaggagttcaagaccagcctgggcaacacagcaagaccccacctctacaaaaaataaaacaactagccaggtgtgatggtacatgcccgtagtcccagttattcagaaggctgaggcatgaagatcacctgaggccaggagttcaaggctgcagtgagctgtgatcatgccactatactccagtctgagtgacagggcaagtcaccatctcttaaaaaaaaaaaaaaaaaaactggggagaaaaactatgcaggtcctcatagtttaactacaaaatcttcatacaatagaacagaggtattcaaagtcaagttagagaaaaaggatagggtgggtccgtgtttagatttataagaaactgtcagttttccacagtagttgtaccatgttacactctcaccagcaatgtaagaaagttccagttgctccacattcctactaatatttggtagtgtcagtgttcttaatttgaatttccctgatgactactcacatggactaattggtcttataatgatctgttcaagtcttctagccattttcattaggttgcctttatatttttgagttttcaaagtatttcatatattctcaatacaagtccctttgtcctacatgggacttgcaaatattttctcccagactgtagcttttctttgcattctctgtttctctcacagagcaaacattttttaatttttatgaagtctatctagttcattgacttttgttttatggaccatgcttttgcttaaccaaaggtaataaagatttcctctgatattttctaaaacttttatagtttgtcttacatttaaagctacaatctattttgagttaatttttgtataaagtgtaatgtaggttatagttgtttgtttgtttgttttttgctgtctttatgtaagattcctaactttccagcaccatgtattgaaaagactatcttttctccattgacttccccaagcacttttgtcaaaaatcaattgaccatatctatattacttttccacaaattgcaccctgtattttacaccattaacctatgtatctatcctttcaccaataccacactgccttcatgagtatagctttattataagccttaaaattgaatactgtgagtcctctacctttgttctttttccaaattgctttggctattctaattacttcatctttcctataaagtttagaatcagctgtatatcctatatatcttgttgggattatgattagaattgtattatatctataaaaaactttgaagagaagtgacatcttaattatattgagtcttccaatccataaacatagtacgcccgccctccatttttcaggtattctttgttttctgtctcattttatagtttttagtatataacatagaccttgcatagattttgtaaaatttatatagatatttttgagcttttgtagacagtattgctgtaaaatttcagtttccaattgttcattgctagtaggtagaaatataactaatttacgtatgttgacctggtatcctgtgaccctgataaattcactgagttttaggagtagtgttttttgtgtgagtttttaaaaaataaattatttggaattttctatgtaggcaatcatgttgtctaagaatagagacaatttatttcttccttttctttctataagcctttttatttcttgtctgattgcactggcttgaacttctagcaggatgttgtttttttaaaattattattattctttaagttctgagatacatgtgcagaacgtgcaggtttgttgcataggtatacatgtgtcatggtggtttgctgcactcatcaacctgtcatctacattaggtatttctcctaatgctatccctccccttgcaccccagccccaacaggccctggtatgtgacattcttctccctgtgcccatatgttctcattgttcaactcccacttacaagtgagaacatgtggtgtttggttttctgttcctatgttagtttgctgagaatgatggtttccagcttcatcgtccctgcaaaggacatgaactcatcctttttatggctgcatagcattccatggtgtgtatgtgccacattttctttatccagtctatcattgatgggcatttgggttggttccaagtctttgctattgtgaacagtgctgtaataaacatacatgtgcatgtgtctttatagtagaatgatttataatcctttgggtatatacccagtaatgggattcttgggtcaaacggtatttctggtcctagatccttgaggaatcaccacactgtcttccacaatggttgaacgaatttacactcccaccaatgtaaaagtgtccctatttctccacatcctctccagcatctgttgtttcctggctttttaatgatcaccattctaactcgtatgagatgatatcatactgtggttttgacttgtgttgctctaatgaccagagatgagctttttttcatatgcttgttgtctgcataaatgtcttcttttgagaagtgtcagttcatatccttagcccactttttgatagggttgtttttttcttgtaaatttgttccttgtagattctggatattagccctttgtcagatggacagattgcaaaaattttctcccattctgtaggttgcctgttcgctctgatgatagtttataaatgtatatgcacccaatacaggagcacccagattcataaagcaagttctaagaaacttacaaagacacgggccatgcgtagtggctcacacctgtaatcccagcactttgggaggccgaggcaggtggatcacctgaggtcgggagttcgagactagcctgaccaacacagagaaacccagtctctaataaaaataaaaaattagcgggttgtggtggcacatgcctgtaatcccagctactcgggaggctgaggcaggagaatcacttgaacccgggaggcagaggttgcagtgagctgagatcatgccattgcactccagcctaagcaacaagagtgaaactccatctcgggggaaaaaaaaagaaacttacaaagagatttagactcccacacagtaatagtgggagactttaataccccgctgtcaatattagatcaatgagacacaaaattaacaaggatattcaggacttgaactcagctctggaccaagcagacctaacagacattgacagaactctccaccccaaatcaacagaatatacactcttcttagcaccatatagcacttattctataattgaccacataattggaagtaaaacactcctcagcaaatgtaaaagaatggaaatcataacaaacagtctctcagaccacagtgcaatcaagttagaactcaggattaagaaattcactcaaaaaccatacaactacacggaaactgaacaacctgctcctgagtgactactgggtaaataacaaaattaaggcagaaatacgttctttgaaaccaatgagaacaaagacacaacacaccagactctctgggacacagctaaagaagtgtttagagagaaatttatagcactaaatgcccacaggtgaaagtgggaaagatctaaaatcgacaccctaacatcacaattaaaacacttagagaaacaaaagcaaacaaattcaaaagctagcagaagacaagaaataactaagatcacagcagaactgaaggagacagagaagaaaaccctttcaaaaaatcaatgaatcaggacctgtttttttgaaaagataacaaaatagatagacagctagcaagactaataaagaagaaaagagagaagaatcaaatagacacaataaaaaatgataaagaggatatcaccactgatcccacagaaatacaaactaccatcagagaatactataaacaactttatgcaaataaactagaaaatctagaagaactggataaatttctagacacacacacccccccaagactaaaccaggaagaagtcgaatccctgaatagaccaataacaagttctgaaattgaggcagtaattaatagcctaccaaccaaaaaaaagcccaggaccagacagattcacagccgaattctatcaaagatacaaagaggagctggtaccattccttccagaacacttccaaacaatagaaaaagagggaattctccctaacccattttatgaggccggcatcatcctgataccaaaacatggcagagacaaaacaaaaaaaggaaatttcaggccagtatccctgatgaacatcgatgcaaaaatactcaataaaatagcaggatgtttaattagaagtgacaagaatagacactctggtctttttcctgcttttacaaggaaaacattcagtctctcaccatcaggaataaacttagctgtaggtttttacagatgcttttatagccgggttaaagaagtggacttctagtcctagtttgctaagcattttaaaaatatgaataagtattaaattctgtcaaatgcttttcctgtaactactgagatagtcacctggcttttcttctttagcaattatatagcgaattacactgattaatttttaaatgttgaaccagccttgtattcctggaatgaatcctacctggaatgaaacctggttatgatatattatcctactgacggattttatttgcttattagcttattttgttgagaatttttacatctatattaatgagggacagttgtctgtagtttccttttcttcaaatgtttgtctggattttgtattagagtgatgccagcctcataaacacagttgagaagtagtacttcctcttctattttctataagcaattgtgtggaattggaatcatttattcttgtaagtttggtagtttatatcttttgagggaatagttcatttcatctcagttgtcaaatgtataagttgtttatagtaatcccttattctccttttaacgtctttaggtcaatagtgatatcctgatgaatactggtaatttttgtcttctcttttttattcttggtcagcctagctagaagtttatcaatctgatccttttcaaagaaccaactttaggtttttctctattgtttcactgtttgcactaattgtcttcattatttcctactttgtttgtttttgtgtttgctcttccatttctattttcttaagtcagactcctagattactgacctgagattatttttcttttaaaaaatatgcattttaatgctccaaatttcccttgaaacactgctttggctgaattttacaaattttgatatgttgtattttcactttcttcttcttttcattttcataatatattctactttcccttctgttctgtgttactgatttttattttgattccattatggtcagagaacatactctatatgatttcaattcttttaaatttgttaaggtttgttttataatatatagcctattttggtaaacgttttggcacttgaaaaggatgtgcattctgccatgactagctcatgctgttttctatgccatgaataataaagtcctttgtctctaacctaggaatttcacgtctttgccagcatccaaagaaaaaagtaacatattagtttgtaacaagggtattatattagttttctatgctgatgtcacaaattaccataaatttagcaccttaaagcaatacaagcttattatctcccagttctgcagggcagaaatctggttagtgtggctcagctgagtcctgtgcatacagtctcacaaggccaaaagtcaaggtgttaacacaactaaattactttctagagtctctggggatgagtcagcttccaagttcattcagaacgttagctgaattcaattccttgtggtaaagggactgaggctttcactcccctgctggctgtcaagggggaactgctcacctcctcaaggccaactgcatgcctcatgatgttaccacctccatcttccaatcagcaacggcacattgagttcttctcaagctttgaatctttctgacttctgctgcatgttttctcattccagctaaagaaaattatttgcttttaagggctcacataattagactgggcccatctagataattcaagatactctcaatatcttaaggtacatccctatcttaattatatctgcaaagtcatgtgtgctttgtttaacataaaaaattcacaggttccaggaattagagtatggatatctttggggccagtctggctaccatgcagactcagaaattgagtcccctggagaattatttatatttttatattttcagttctaagtattccatttttctacaacttctatttctttgctgagaacttccaacattctatttgttttaagaacagttacttcatggcatactgttgtgggaagtcagggaccccgaacggagggaccggctgaagccatggcagaagaacataaattgtgaagatttcatggacatttattagctccccaaattaatacttttataatttcttatgcctgtctttactgcaatctctgaacataaattgtgaagatttaatggacatttatcacttccccaatcaatactcttgcgatttcctatgcctgtctttactttaatctcttaatctcgtcatcttcgtaagctgaggatgtatgtcgcctcaggaccctgtgattattgcgttaactgcacaaattgtttaaacaatatgaaatctgggcaccttgaaaaaagaacaggataacagcgatgttcagggaacaagggagataaccattaggtctggctgcctgagagctgggcggaacagagccatatttctcttctttcaaaagcaaataggagaaatattgctgaattctttttctcagcaaggaacatccctgagaaagagaatgtgttcccaaggggaggtctctaaaatggccgctttgggaatgtctgtcttttacagttgtggataagggatgaaataagccccggtctcccatagcgctcccaggcttattgggacgaggaaattcctgcctaataaattttggtcagaccggtcgtctgctctcaaacccggtctcctgatgttaccaatgacaatgcatgcccaaaacttcattagcaattttaatttcgccccagtcctgtgatctcgccctgcctccatttgccttctgatattttattaccttgtgaagtatgtgatctctgtgacccacaccctattcgtacactccctccccttttgaaaatcactaataaaaacttaccagttttgcagcttgaggggcatcacggaacctgccaacatgtgatgtctcccccagacacccagctttaaaatttctctcttttgtactctttccctttatttctcagactggccgacacttagggaaaatagaaaaggacccacgttgagtatcgggggctggtttcccccgatagcacacagttataacaaatgttttacattctttcataaattcaacatgtaggtcatcctggggctgacaactgttgtcttttcttgtataaattgttgagattttagtaatttttatatgctaattttcagttatatcctgagcacttcgaatattaagttataaactctgaatcctcttaaaattttccagagaatgctgatatttttatttatttcagcagacaagcaatccaattaggttcaaggtacatatccctgccctccttctggggtcccaatgttagttcagttttaaagtctttgcagtgctaccacatgtacacacaccaaaggggcaaatctgaaacttggatgattgtaggtcagttctcaaagcgcctgatatgcaggcagttcctgcacatgcagcacagaagtgagtcaactatacccttatgaagatgcccttcttgagctccgtaccccctacaattttccccataatttccagctcccagaggtcccttttcattatactggagctaagagtctaggatgttagcctctgcatactatcatatacttcccacaactgggcctgcctctggacaaaaagcatttttcctatttttaaattatttgtcataatattgttacactgtaagagttcttaatatattcttggtacaattcttttctcaactgtatttttttgcatatgtgtgtctgcttgtggcctaccttttaattttcttaatggtatatttaaaagagcaaaagattttaatttttttaagaagtgttttattttggactaatttgagacttataaaaatgttacgaaatagtacagttttcttgtatccctcatcacacttcattacaatataaacattttacataaccatatagtaatcgggaagaagaaggaaattaacattagtacaatatcattacctaaactaaaaaccttattcaaaaattcaccattttttccactaatgtctcttttctgttccaagatcctatccaggatcccatgctgcattttaactgttattcctccttagcaacttccagtctctataaaactttcttagactttcctttcctttcataacctgggaacttttgaagaatactaaccagttattttagaaaatgtctccaaatttggatttgtcatggtttctcatgattaaagtggggttatgcattttgggtaaaaataccacaaaaattacatttgtccttctttccacatcgtatcagaaggtttagggtgtcaatattactgatgatgtttacctcgatcccttggttaaacagtacatgccactgtaaagatactacaaagtttttctttgtagtcactaagtatgctaggggagatactgtgagactatgcaaatcctatttctctcctcaaactttcacccactaattttagcaactattggcggattctgtcagtaacatttactactaaaatatttccgtaatgtgattgtctttttttttttgagacagagtttcgctctgtcacccaggctggagtgcaatggcgcaatcttggctcgctgcaacttccacttccagggttcaagtgattctcctgcctcagcctcctgagtagctggaattacaggtgcccgcctccacacctggctaattttttgtatttttagtacagacggggttccaccatgttggtcaggctggtctcgaactcctgacctcaggtgacccacccgcctgggcctcccaaagtgctgggattacaggcgtgagacatcgcacctggcctataatgtgattctcttttttctctcttttcttcaacatttattaattagaattctactacaaggaagttatcttttctatttatttatttaacccatctatttatatcagcttgaactcatgaatattttatttcaaaagttagcaaactttttctggaaagggctagagagtaaatgttttacgctctgtgggccatacagtttctgtcacaactactcaactgggttattataacactaaatcagccatagataatatgtaaaccatgcattcccattgggagcaatatcatctccgaaggggcaaaaattagttcttaaatgcatagaggtctgattgcataaagcacagaaatacattcaatataggaactgatatatagcatatctgagctattaaaattttgtagtgggtgagggcattgatatagttggatctgtgtccccaaccaaatctcatgttgaaatgtaatccccaatgctggaggtggagcctgataggagataactggatcatggggtagcttctcatgaatggtttacaccttcctctgggtgctgttctcatgatagtgagttctcatgagatctccccacctcgcttccttctactctagccatgtgaagtgccttgcctcccctttgccttctgccatgactggaagcttcctgagcctccccagaagcagaaactgctatgcttcctatacaacctacagaactgtgagccagctaaacctcttttctttataaattatccagtctcaggtatttctttatagcagtgtgagaatggactaatacaggtgtttagagaaaagacaatatctaaaagggctccttagggggcagtaatagaaatgcacttgtaaaatactgaggtaacaaatagtcatatctgaattcaattaaaaccttatttacaaaaaataggtgacacgccagattgtctcaactaggaaatatagttatgtatactaacccatgcatacattctatagtctgtatacatagatacattctgtatctaagtatttgaaaatcatgaattcgtatcaacacttcagattctaatccgaaaccacagggctcatttaagacttctccctttatttataacttcttactccaagagtgagaaactaggctctcataatctatggtctatttactttagtagacacaaagacagttcagaattggtagccctgtggaggacaattttactaactagattacagcattatgtgcagtttttttttttttttggtctttatccttacagttaagatactgttaagacactgtttttcagtcatttaggttcattgttcgcaacaaagctcagcagcagaggagaggaaagagcgcttgtgaaacggccgctgaaatttgtttctttttctctttttacttacagtcattttgcagttttggtattctctgtttaagtaatgctggggctatggtttgcacagaaagtctggagaagagattttgggaggttacttactacatacctgccattgtcttcacttacctggaggtctgataagttattttaatgaggttcaatttataattttactttttataattcatgctttttgtgttctatttcctatgctttttctagaaattttatagttttacctctcaccttttaaattttatatatggtgaggtatatgctggggttcattttttcctcataatagatattcagttgtttttcacatcatttgttgacaagagaccattcagtacagagaaaaaatgctgatgtaggttaagataagaacgtttctgaaacagggaaaaaagagtgggatccagtacacaagcagcaggattaatattggataggagctgaatgtattgcttttggacagttggaatctgaagattctcttccgattggtccaattttcttaatgagaatgaaagcatgagtgttgttcaggtatccttcaggttaacttaatatcttacagttaagtttcatccacataatgcctagtatattgctgaacatatagtaaaaactcaacatttatggattaatttgggagacaaatgacagatgtaatcatctgagggtatattcccattctaaaacatttaacaagattattacccatccatattgtgacactatcatctgaaatatatggaaagaacagatttttttaaagttcttcttcctattaatattgctgagtaatggaaattaattagatataagcactgtcatcaaatcccacaattacatattaagttgctttaagtatttaatctctaaatttatcataactataaggaaataacatgttaaacaaacataaagtgagctatcatcttcctcataaatctccattcttacatgcaaatatatcaatgttcctttacatttatctcacacatctcaaatgagcactgtacactagtagagaactctattaaacacttagctggtaaatgtgcatccttttctcaacctccaaactctcacatgagcacagttcccccctatcaacctctgccttgcagcagataagcctgtcttgtacttaatgattaacatagatcgaattaaagaagatacttcattcccatgaaattcactaatctaactgtactggcagactctgacttctctttatgtctatactccttgaactctccgcttgtgttctaggtcccattctccttagtttcaagtactttactcctagaactatgctttctggaattattgcttcctcactactgagtcattcctattaccattcaaatatacccattaaaaaacaattcccttgaccaattacccatcatcccatttctctgctcctcattcaaagcaaaacttctcaaaagaggtgtctcatctttttcactccctttattgtgttaacatacttcaaagtaggcattcatctcttctccttcactgaaacagttttttccaggtcatgtatgacattgccaaacctaatgataaactgtatgtccttattcccctccatttttcagtagtgtttgacataactgaccacccacgtttttgaaagactttcctctctaggcttcctgacttcacagtttatcagcccttccttctctgtctccattggtaggcactatctcctgcaccccacctctgaatattaaagtgtatgagggctttgtcttggctgttttcccttcctttcccaggtgatttcatccaatcccacagctttaaatgcatatagactgtgataactcccaaccctgtatctctaggtcagcacaatggatacattcctcaaatttaactcatcctaaagagaatctgatttcctccttacctttccaatctgctcctccttgccttagtaaatgatatcaccatccattcaattgctcagaccaagaagctaaatttcatcctcactacttatcttttcctcactcatctcatgcattctattagcctgtcctactggctctatcatcaccgtcatttctgctacaatcttaatctgaaccagcattcatcttacatcacaactacttcggtagccttctgtctacctaccattattcctctattgcttccctttagagctttctcaacatagccaggtgatctttaaaaataacataaatctgatctcatcatttacctcggtaaaaacccaatagcttcctaccgaattagaatgaaacctgaaccatctaagatggcactttcaagcctttgtaagatataccttcggccggacgaggtagctcatgcctgtaacagcactttgggaggctgaggcaggcagatcacgaggtcaggagttcaagaccagactggccaacgtggtgaaacccgtctctactacagacacaaaaaattagcaaggcgtggtggtgcgtgcctgtaatcccagctactggggaggctgaggcagaagaatcgcttgaacctgggaggcggaggttgcagtgagccgagatcctgccactgcactccagcctgggcgacagggcaagactccatctcaaaaaaaaaaaaggtataccctcacctacttctcaaaccttagctcctaccatttttccttttgttcactacactccagctacactggcctttctatcccttaaaatggccaagctcattatgctatcaaagtctttgtctggaatgacctcccaaatctttgccgcattcatattattcatgctttggggcaaatataacttgctcagagaagctctccctaactactcctagtcatcccaacatattctgtccattactctaattatttcatgtttcccttcatgcttactccttcggaggtatctgcatgccagtgttacaaggtaggcactatgttttacttgatcttttaacaatccagtttacctttaaattcagccaaacccactgcagctactccacgagtctgctgaaatcatcacctgaggcactgggtcatagtacacctcacttgatatcatacaggatgcacataattatgaccttccaggttccctgtgagtgagcatttttctggactgataatgcaggatatctgtctttcggtgttttcagctcatgatgacactgaacagatccaccaatagaaaacaaaaactttgcttggtaataaatctccaaacagggaatatccagcgtgggagggccttaggcaagaagcccaaagtatttaaggaggtcccagtacttacccacattgtcatataacgcataatagtaaatgagtggatttggctaggtcctgaggtttttttcaggttgactcctaggccagcacctgaacatggattactattaaatccagagcagtggttttcaaccctgcctgcatattacaatcatttgggaagcttaaaaattaaaaacagaaacaaacaacaaacgatacctggaccccaacctaaacaaattaaatcacaatttctttgggtaaggcttggccattggtggttttattttgtttgttttcttttaactttctattaagcagccagggttgagaatcaggaatctggagcagtgttctcaaactttagattatattaacatcacctggaggtgataaaaaacttattactggggccgggcatagtggctcatgcctgtgatcctagcattttgggaggccaaggcaggcagatcaccagaggtcaggagttcaagaccagcctggccaacatggtaaaaccccacctctactaaaaatacaaaaattagcttggtgtggtggcaggtgcctgtagtcccagctacttgagaggctgaggcaagataatcgctcgaacccggaggcaaaggttgcagagagccgagttcatgccactgcactccagcctgggtgacgagagcgagactctgtctcaaaaaagcaaaaaacagaaaacaaaaaacaaaaaacaaaaccacacaactgattactgggctctacacttagagtttctaatttggtagatctggaatgagcccagataattcgtattttttagtaactttccaggtgatgccgttgctagtctgaagaccacacttttcagaagcaacgatccagggctgccagctatgtgtcatttttttaataaccaagtaaagcagaaactgctggaacaaatctgtttttaagaaatgttatgaatacataatagttatacattggaacgaatcttgaaagaggctagttttgtgtaccaataatgacatgactcattttctcatcttcttcctgctcttccttttcccctgggcatacacagtcttttggggagtcttatgattacaatataattatagcaaaacttcgctaaggtgaagcagtcctcatcttattggacacagctgataattcctttctccctgaaatactctcttcacttgacttccatgatcttatactcttggtttttctcgtgtttctctggccacatttttgtcagttcttcatctcccctacattaaaatgttggagtgccacaggaatccatttattagatcctttatctaaactcactccttcagtggtctcatctaggttcatggctttaaatactgtctatatgctgataacattcaaatctataccagctcagattgcttccctgaattatagacatgtatgttcaacagcctaatttaaaaccccacttggttgtctatcagataatctcaaatagaacacttctaaaacagagttgcttggtcaaagtcatgaggcccctgtttcaggccctagctaccagacgacatttttattccctgggacagaagggaaactgctgccttgaagggaaggacctactcctggcagcattcaccacctgctaactgaatagcccttgggccctgaataaccagtagcaatacccgggtactatgtcaagggccttaagtgagcctctgaggcttgctggcttcaggtaggatacagcacattatcaactgtggtggccatggggcgaaactccttttgcttgagaaaagcggagtgaaaagtaaatactttgtcttgtaccttaggtaccagcatggccataggggtgggtagatcaccaagtgggatctttgggtccccaattccagaacctgactcttagatggcatttctggacctgccctggggcagaagggagcccattgccctgaaaagtgagtcccagaccaggcagcattcaccacaagctgacttatgagcccttgggccttaagggaacattggcagtagtctggtagtgctctccatggcctgtggtggcaggcagtggctgtagggagaggctcctctgtctttagagagaagagtgggaaggactgcgccttgtggtttgagtgccagcacatccacagtacaacagaacaccaggtagacttctaaggtttttgactctagtccctgactcatggatggtacctctggacccacccaagcctgggggaactcacagcgctgaagggaagcacactggcctggccggctttaccacctgagtgtagaaccccagggccttgagcaaacataggcagtaaccagggactgattacagcaagccttgggcaagacaaagtgctgtgctgtcttcaggtctgacccagcaccatcatagtggtggtggccacagggtgattatgtcattcacccccagctttaggtggctcagaagagagagagagagagagactccatttgtttgggagaaagtaagagaaatgagtaagagtgtgcctgcctggtaatccagagaattctccgggatcttgtctaagaccatcaaggtggcacctctatgagtctgcaacaattacagcattactgggcttggggtgccccctaaagcagatacagcttagatcacaacacccaagttctttcagatatcttggaaaggctttccctaggacaggtacaaacaagctcagatagtgaagacaacaatacctaactcttcaatgcccagacaccaaagaatatctactagcatcaacaccatccaagaaaacatgacctaaccaaagaattaaataagctaccagggaccaatcctggaggaacagagagatgtggcctttcagaaagagacttcaaaatatagctgtgttgaagaaactcaaagaaattgaagataacacagagaaggaaatcacaattctgtcagataaatttaacagagactgaaataatttacaagaaccaaacagaaatcctggagctgaaaaaatacaattgacatactgaagaatgcatccaagtcctttaatagcagaattgatcaagcagaagaaagaattagtgagtctgaagacaggttattttaatcagagaagacaaaagaaaaaataaaaaacaatgaagtgggtcgggcatggtggctcacacctgtaatcccagcactttgggaggtcgaagcaggtgaactgcttgagcccagtagttcaagaccaacgtgcgtaacatggcaaaaccctgtctctaccaaaaaaaaaaaaattagctgggcatagtggcacatgactgtagtcccagctactcagaaggctaaggtgagaggctcacttaagtctgggagtcagaggttgcagtgagctgagattatactgctgcactccagcatgggtgacagagcaagaccccgtctcaaaaatgaaaaaacagaaacaacaaccaaaacaatgaagtacccctataagatctagaaaatagtctcaaaagggcaaataaaggagttactggccttaaagaggagctagataaagagacaggagtagaaaggttattcaaagtgataacaacagaaaaagatatccccaaacctagagaaagatatcagtatccaagtacaagaaggatatagaacaccaagcagatttaacccaaaaaagactacttcaaggcatttaatagtcgaactcccaaagatcaaggataaagaaagggtcctaaaagaagcaagagaaaagaaacaacacacaacggagctccaatacatctggcagaagactttacagtggaaaccttacaagcctggagacagtggcataacatatttaaagttctgaagtaaaaaaaaatttaccctagaatagtatatccagtgaaattatccctcaacatgaaggagaaacaaagactttcccaaacaaaagctgagggatttcaacaccagacctgtcctacaagaaatgctaaaggaagcacttcaatcagaaagaaaaggacattaatgagcaataagtaatcccaagtgggttttgaaggtacaaaactcactggtaatagtaagtacacagaaaaacacagaatattataacactgcaactgtggtatgtaaactactcttatactaagtagaaagactaaatgaaccaataaaaataataactacaacaactttttaagacatacgcagtacaataagatagaaataacaaaaagttaaaaagcaggaggatgggccgggcacagtggctcatgcctgtaatcccggcactttgggagctgaggcaggcagattgcttgagcccaggagctcaagaccagcctgggcaacatggcaaaatccatctctacaaaaactacaaaaattagctggacatggtggcacacacctgtagtcccagctactcaggaggctgaggtaggagggtcacctgagcctgggaagtcaaggctgcagtgagtcaagactgtgccactctactcctgcctgggcaaaagagtgacatcctgtctcaaaaaatacagcaaatttttaaaaatgaggggaccaagttagggcatagagtttttgttttctctttgtttatacaaacagtgttaagttgttatcagcttaaaataatggatgatagtatttgcaagtctcatggtaacctcaaaccaaaagacataaaatggatacacaaaaaataaaaagcagaaaactaaatcatatcaccagagaacatcaccttaactaaaataagacctgaacgaaagaaggaaaaaaaagacaatgaaacaacaagaaaacaaataacaaaacagcaagagaaagttcttacttatcaataacaataaagatttgtttaatattgtatggattcctgcaagtttggggctctcttcaggtacacaagagttaaaaacttcaattttgagtgtacgacttttctcagaagccactgtggtttgccctgttaagtatatattatattgacaattctgttattttctgtttctggacatagaactgtggaaggttaagaagtggtaagtggctgggtgtggtggctcacgccagtaatcctagaactttgggaggccgaggcgggtggatcacgaggtcaggagatccaggccatcctggcaaacatggtgaaaccctgtctctactaaaatacaaaaaattagctgggcaatgtggcgcacgcctgtagtcccagctactcaggaggctgaggcagaggaatcacttaaaccagggaagcggaggttgcagtgagccaagaatgcgccactgcactccagcctggcgacacagcaagactccatctcaaaaacaaaacaaaacaaaacaaagtggtaagttaaatatttcagggatcaataatgcagtttatcaaagatatttgggttttctcccttttaagcatataacaggatttcatttttgggcttctttgtggttggttggaacaatgttattagtttttggggtttctttcaaatgagttaggagcctatgtgatgaaacttccatgctaaagcatttagattgtagattgtatatgtgagaatttttggagctctcttttcttctggcgcaagcaaccatcaatgttcaaggtaatcactgctccattagtctgtgttcaagagtaaccacaaagaacagaacccttagggaaactaattaatgatgggtatgaaaaatataccttcgttattaagcaatccaggttttggggatatttgttaccataccaaaatttagtctatcttgactgattaaagccttcttctaatatcttttttcctgaagccataaagaaaaagcgaaactatgagtatcatatcagaagtttaaatatagcacagaaatatagatttactcaacagaaagggaactgaaccagatcctgccttctgccactgataagttatgagacctatggctaattacttaatgtccaatagtatcaacagtttatataataaaggctaacaagggataatggcacgtctttcatttacatcatccccaagaaaatgagttggttctctgtcatctttagaaggtgaccaattaccttgaacttgaatttactgcaattcttaccctaattaaaaagctcaaattgtcccatgtagaagtcacttcatattgcctccttggaactttgtttgtcaccctactagtcttttatatatcctctgctctctgatgtcaagatattctaggcgcaaaccaggatcagctgtttctccattaatccttagtttttatcttgaggaatgaattttaagaccagagtctgggacttgctatctatactggctttgtcacagttttgtaaactttcagtggatagaactaggttaaaaaatgcatatatgatacattgtgagttcatatggacatttccaattcaaatccagaactacaaaatttttacttctatgttactgtgaggaaataattctctatggatctctcatgtttctgaaaaaaaatttttttttttgaaatggagtcttgctctgttgcccaggatggagtacagtggtgcaatctcggctcactctgtaacctccacctcccaggttcaagagattctcctgcctcagcatcccaagtagctgggattacagaagcacaccaccacatccagctaatttttgtatttttagtacagatggggtttcaccatgttggccaggctggtcttgaacttctgacctctaagtgatccacctgcctcagcctcccaaagtgctgagattataggcataagtcaccacacccagcccgtgtttctgaaaattctgaatgcagaggtattgactgtctttgttctaggctattttttggaggatatttgtatagcaaacagacttgaaaaataaagataatatctccctctgcacaaagggtagatttgtttactgttcagtataataaatgtatctctctccagcacaaaggacactttatcagtcagggttctgcagagaaacagaatagaatacatacaaatggatttatttcaaggaattggctcacatgactgtgaggatcgacaggtctaaaatccacagggcagggcagcagttgatgtttataaaaaatctttttttttttcttttaagatggagtctcactcactgtgtcatccaggctggagtgcagaggcgcgatcttggctcactgcaacctccgcctcccagattcaggcaattcttgtgcctcagactcccaagtacctgggattacaggcgcgcgccatcatgcccagctaattttgtatttttggtagagacggggtttcatcatcttggccagaatggtctcgatctcttgacctcgtgatccatctgccttgtcctcccaaagtgctgggattacaagtgtgagccactgcacctggctgagtggggccccttataaagaataatctcctttcctgaaagccaactgataagatgttaatcatatctataaaataccttcacagctcacttaatgtttgattaaatcatctggtactatataacctagccaagatgacacagaaaactaaccatcacaagcaggtttgtttgcagtctattataaaagattcagtttccctaaactccaggttacttagctgtgatgtaaactcacaatttaggctcctctatatcaccctgtgggtttaggcgggcaaagatgactgatacaaatacaatgctcatgctgttttctgtgcatatacaaagtgataaatccttttgtctctgacccagaagctggtgtgttctgtcagcatctaagaaattgtgataggctcctagtaactttccagtagggtaaaactgcagaactttcacagttcttcacacttacatctgattttttttcttccatcctgagaattttggttctcaaatgtaatagatttataaatcagaatgtccccaaattactgatttgttttatcccaccttgcacacaccacagactcagaataacaataccaatgatactaccactaattataattactaaaaatagtcacttcttttgtatatccttatcccctctttgcatttcttattgatatggtttagttgtgtccccacccaaatctcaccttgatttgtagttctcataatccccagacatgggagggacctggacaaggtaactgaatcatggtgacgattactctcatgctgttctcatgatagtgagttcccatgagatctgatgattttataaagggcttttccccctcttcactctgcacttgtccttgctgccaccatgtgaagaaggacatgtttgcttccccttctgccataattgtaagtttcctgaggcttctccagccctgcagaactgtgagtcaattaaacctctttcctttacaaattacccagtcttgattatgtttttattagcagtgtcagaacgaactaattcagtaaattggtaaagatacccaaaaatgtggaagtgactttgtaactgggtaacaggcagaggctagaacagtttggagggctcagaagaagataggaaaatgtgggaaagtttggaacttcctaaagacttggagggctccgaagacaggaagatgtgggaaagtctgtaagttcctagagacttgttgaatggctttgtctaaaatgatgatagtgatatggacaataaggtccaccctgaggtggtctcagatggagaagagaaacttgttgggaactggagtaaagatcaatcttactatgcaaagagactggcagcattttgcccctgccctagagatctgtggaactttgaacttaagagagatgatttagggtatctggtggaagaaatttctaagcgacaaagaattcaagaggaagcagagcatgaaagtttggaaatttttcagcctgatgatgcagtagaaaagaaaaacccattttctggggagaaattcaagcctgctacagaaatctacataagaacgaggagccaaaggctaatcacaaagacaaagaggaaaacgtctccaggccatgtcagagacttttgcggcagcccctcccatcacaggctcggaggcctcagaggaaaaactggtttcctgtgccaggtccaagacacctctgctacatacagcctagagacttggtgccctgtgtccccaccactccagctgtggctaaaagaggccaaggtacagctcaggccatggctttggagggtgcaagccccaagccttggcagcttccacatggtgttggtcctgcaaatgtgcagaagacaagaactgaggtttgggaacctctgcctagatttcagagaatgtatgaaaatgcctggatcgggcacggtggctcacatctgtaatcccagcactttgggaggctgaggtgggtggatcacctgaggtcaggagttcaagatcagccgggccaacatggtgaaattctgtctctacaaaaaatacagaattagtcaggtgtggtggcacacacctgtagtcccagctactcaggaggctgaaacagaagaatcgcttgaacccaagagctggaggttgcagtaagccaagattgagccactgcactcctgcctgggcaagacagagtgagactccatgtcaaaaaaaaagaaaaaaaaagaagaaagaaagaaaagaaaatgcctggacgtccaggtagaggtatgttgcaggggcggagccctcatggagaacctctgctagggaagtgcataaaggaaatgtggggttggagcccccacacacaaatgtggggttggatcccctacacagcttcactagggcactgcctagtagagctgtgaaaagacagccacagtctggaggatggtgtaaatgtaaaggactaaaatctccaatcaaaagaaatagagtaggtgaatggatgaacagatcaatggaagatccaatggaacagatcaatggagcttccactgatccaagaaacacacttcacctataaatacacacacggactgaaaataaaaggatggaaaaagatattccatgccaatagaaaccaaaaaagagcaggagtagctatatttataccagaaaaagtagatttgaagtaaaaaaacaagtgacaaagtcaccgtataatgacaaaggggtcaattcagcaagaagatataacaattttaaatatatacgcacccaacactagagcacttagatatataaagcaagtattattagagctagagagagagacaggccccaatataatagctggagatttcaacaacccatttgcagcactggacagatattccagacagaaaatcaacacagaaacatctgacttaatgtgcactatagaccaaatggatctaatagatatttgcagaatatttcatccaatggctacagaatgcacatttttttcctcagcacatggattattctcaaggatagactgtgtgttgggtcataagacaagtcttaaaatgttgaaaaacattgaaataatatcaagcatcttctctgaccacaatggaataaaactagaaattaataacaagaggaatacaaatacgtggaaattaaacaatatgctcatgaatgaccagtgggtccatgaagaaattaaaaaggaaactgaaaaatttcttgaaacaaatgtaagtggaaacaacataacaaaacctatgggatactgcaaaagcaatactcaaagggaagtttaaagttgtaagtgcctacatcaaaaaaaaggaaaaacttcaaataaacaatctaatgatacatcttaaagaactagaaaagcaagagcaaaccaaatccaaaattagtagaaagaaataagatcagggcagaaataaatgacattgacattttaaaaaaccaatacaaaatttcaaggaaacaaaaagttgtttttttttaaaaagttaaacaagattgacaaacctttagccacattaagaaaaaaaaaacaagatacaaataaaattggaaatgaaaaaggagacattacaactgatactgcagaaattcaaaggatcattagtggcttctatgaccaactctatgccactaaatttgaaaatctaaaagaaatgaacaaattcctagacatatacaacctaccaagattgaaccaggaagaaatccaaaacatgaacagaccaataacaaataacaagatcaaagccataataaaaattccaaatcaaaactacaatgagataccatctcaccccagttaaaatgacttatatccaaaagacaggcagtaacaaatgctggaaaggatgtggagaatgtaaatttgtacaaccactatggagaacagtttggaggttcctcaaaaaactaaaaatagtgctaccatatgatccagcaatcctactgcagggcatatacccaaaagaaaggaaatcaggatatcaaggagatatctacactccaatgtttgttgcagcactgttcacaatagctaagattcggaagcaacctaagagtctatcaacagatgaatggataaagaaaacgtggtatatatacacaatggagtactagtcagccataaaaaaacgagatcctgtcatttgcaacatcatggatgggactggagattgttaagtgaaataagccaggcaaagaaagacaaacatcgcatgttcccacttatttgtgggatctaaaaatcaaaacaactgaactaatggacatagagtagaaggatggttaccagaagctggaaagggtcgtggaggactcagggggaagtggggatggttaatgggtacaaaaaaagagttagaatgaataagaccatttgatggcacaacagggtgactatagtcagtaataatttaattgtacattttagaataactaaaaggttgcaactggattctttgtaatacaaaggataaagccttgaggggaaggatacccaattcttgatgtgattatttcacactgcttgcctgtatcaaaacatctcatgtaccccataaatagataaactcactctgtaaccacaaaaatttaaaataaatttagtaaaataaaacagagctgttgatctttccttctgtccaaaatataaaacttgctcttccaacactgtttcccaattcagtagccagcaactccattcttccaattgttctgaccaaaaattctgtgatcatcactgacctttcttttctctcacaatttatatgtgatccattagtaaatcatgctacctctatcttcaaaatacataaaaatttgctcttttgtcactactttcactgttaccaccccagtccaagccaccaatacttcctgactggattactgcaacagtctcctaagtggtctccctgcttccatcctgcccctgcctctcttcagtctgttctcaacataggagccagagtgactttgttaaaccgtaagtcaaattatgtcactattttgattaaatagttccaataacttccattctcagatgggaaagtgaaaatcctctcaatagcctataaaatctgcccccaccaccatagctcatcagacctcatttcttactactttccttcaagttcactctgctccagccacactaacattcttactattcctcaaaaatactggcattctgcttcagggcatttgcatttgatagtccctttacttaacatgtcctttccacacagcacattacctcacctcctagtctctacttaagtgtcacctttacagtgaggtcttcctggccaccctatctaaatacctatctaaactcttcccaatagtttctatcgcattttctcaccttcttttccttagctcttacaaactatacatatatacatgcatatataaaaatttacacacatatataaaatttaccttctttattctgtgtctccccacccagtagataaaagctccataagggtgggcaattttatctgtttggttcactgccatatctctagtgataagaatagtctttggcaaataataggtgttcagtaaatatttgctgaaagaacaagtaaaccaagaaatagatatgtcctaaatgccacttaagaaagggtcttaagaaggtgtaaccaactgataaggtttggctctgtgtccccacccaaatctcatctcgaattgtactcccataattcccatgtgttgtgggagggacccagtgggagataatttgaatcatgggggcagtttcccccacactgttctcatggtagtaagtctcacgagatctgatggtttcatcaggggtttcggcttttgcatcttcctcattttctcgtgctgccgccatgtaagaactgcctttcacttcccaccatgattctgaggcctccccagccatgtggaactgtcaatccaattaaacctctttttcctcccagtctcaggtatctctttatcagcagcatgaaaacggactaatgaaccaactatgtcaaatcatgatgaaaaatcaaataagatgagaactgataaccactggatttggcaatgcagaggtcactggtaacctcaacaagaactgctatggtgaaacagaacaaagccaagagtaaatgggagaaaaggaactgaagatagtataagcaaattcttcaaatattctctcataacacaaaaccactgcacacaatgttacctcttcccagaatgctataccttctttcatttcttctgatgacccttctccctattgtcctcaaagacttagcttaggtattatattctataagaaacactgtgaactttttatatccccatgtacataccatatcacaggtacattagtgctattcctagtatacatatgctcattgagcatctgattgtgtctaaactctgagtatcttaaggcagggattcttgcacaaaacagaagctcaacaaatatttcttggatgagaaaactttgaaataaaagttcttaatagcttctaataattcattattccacgttttccttaatgtatatccaaaacatgttttattaattgtctgcatatttgcacataagacattataaaataataaaggaaaataattaaatgtaaatctaataatctggcttctccctaaagaatatatacttaatacacatctattacaacttcaactattattctagttaattcctacttttcctggaaaacatctcttaattttatcccttaaattatgcaatatttaaaaaaccataaatattttgatattgcaacacataaaatgaaatcttaccaaatataattgttacatggtctataaataaatgttaagtccatctaattctagttacttaagcacagggacattttattaaatatgttttctaatactttttgaagcactacttctacatattgcacagtgcttaagaaaactctggtatcaggtttgaggagagggtttgtgcccatttctcaaacggcttgtgttaagaattctaggcatggtgggggcaatgtgtttcccaaacagaataatctgaggcactttttaaaaaatagattcctgggctccaaccctagaagattctgactttgtgcgtttgagcaaaaggctagaaactggtgaaaagctcttcaaactattttgaagataagccaggtttgggaaatcatgagcatgtatctagaagcattaagtagactacaagtaggtttccagtaattcctaccagagcttaaaaagttgctactctgaacccatataaacacaaaaaaaatctatctaccgtgcaaatgttattctgaatcgcttttccaattacaattttgacttgcgttgaataaattaagtttctataccataaatactgagctgtcaaaaaccacttttactaaactacaataagacttggtcagtattttttcttaagaacacgatttaccacaaataaagaaaatagcttctacacccttcattttgtcttttaaaaaagccatacatagaagcaatgaacagttattattttaacctgcaaccatatagtgtggtatacttttcaaaatatttcagatgcatcgtcatttgagctcatcaccaactggtgagaccctttcactatgttaaaaaaaaaaaaaagtactctaaattctatacctacttaatacataaacaatgggctctgactcccataaggaaagcagagtcaaataacaaaatgccccaagttaattatattccatcaatggtcttcactggtatagattatttgtaaactctcaataatatccttaagaacaatcttgcaaaaatttgcttacgggaagtacctagaataataaatttgaaaagatattgcactctggctgcacacggtggctcacatctgtaatcccaacactttgggaggcggaagtgggaggatcacttgagcccaggagtccagcacaccagcctgggcaacatacagagaccccatctttaccgaaaaaaaaaaaaaaatagcccagcatcatggcccacatctgtggtctcagccacttggggaggctgaggtgggatgatcacctgagcccaagatttcaaagatacagtgagcagtgattgcaccattgcactatagcctgtgtgacgcagagcaagggcctgtctcagtttaaaaaaaaaaaaaagctatcgcattcttgtaacaactggcaaaagtttcaaaatatagaccaaggtatagatgtgcatcttatgctaaaactggtagtagcttattttataacttagtcttaaatctagactagagatttttatagatacagattttatagatttatagattttatattgatagaataactggagaattttatcaatataacttgagaaaaagaacaaaaaagtgaccccaaaagccctatattatttctgacattgaaactaattgccatataaaccagttactaagataaatataactaaaagataaatgactagagaagtatacacaagtagatggcaaaaagaagatggagaactacaagcaacactgagaaaatgatgaaatgtcatgtggcaccaccactggcaatcccaggtgataataaaatggtcaaagaaccagtaagcaaatgatagactagtcatgattcagcctttactgagaaaatgatgaaatgtcatgtggcaccaccactggcaatcccaggtgataataaaatggtcaaagaaccagtaagcaaatgatagactagtcatgattcagcctttactgagaaaatgatgaaatgtcatgtggcaccaccactggcaatcccaggtgataataaaatggtcaaagaaccagtaagcaaatgatagactagtcatgattcagcctttaccaccaacattgcactcacattttcaaaacctgaggacaatgatctgctcattctggaacagttctatcctcagactaagtaatatttgaccaataagttttacataagtttcaggcaaaggtggaaacaaaacagatgatgaaaacagcactgactttttattactaaagctaaggttacagcaacattggttttcactatgcatcacatttgtgaatattacatcttctgctgtggcataatttaaaaattactagagttgtttctatactcacaagtcaaacactgaactgaaaaaatattgaggttttaatattagctcaatatatttcacaaacatgaatgatctgtcattactatttgaaataaaatgtccagagccctttcactgattcctaaattatattctcagtatcatattaaatttgtgccaccaatttcaagatgctgtatgattcagattttactccctcattgaaacttttcaggaaacttattttcattgttatacattaaagatgtgtcatttggataaaatcataagcatgtatattcaacgatgagaaattcgagtatgtttgttgttttgtataagttgtgcaactataccaaaagaaagtcaaagcattaccttccttacagtttactgaaacacaattatgaaatttaagcggtgtgacatataacacagcttctaattactgctagaagaacaagatgtaatttacctcaccaaataaatcatatctagtttcagaagaccttagtgctatactgctctcataacccccaaggagtaaaaacaatacaagtgtaccacgagaagacctcaaaatccttcacatttactccaccagctgaattcaacctaacagactaaattatctggagcagggcttcagttaaggctgctccagctaggtaaagctactatgcctggtactttgggagacctagcatatggaaaagaagggagacttgaaaggattagggaaaaagacaagacactggggtaaactctactcttgggataactaagaagataaataattactacgggtttactttagttttgtttttccatcagcaatttgggctattataataggtctgtaaccctaatcaccacgatacagagtcccagcttgagaaaaatgaaatgacttatcagttaccttttcaaagtaatacattaaatacaatctgaaaaagcactctggtgtccaaaaaacaaaaacaaacaaaaaaaaccaactgaatacagagcaccacctcattccttactctgcaatctcaattttgtcttttcttatctttactccatcttgccctacctctgtttgtcctaggcatcctttccctcttacatattatagatgtacagagacgcaaaacagaagaacaactttatttgtggaatttacataccagggcttcttgcctacaagacttcaaaccaaggtaccgtatttgaaatgcccaatttaaatcctgtgcaacatacatgagggaataacattttgtaaccaaacccaaatcgtagaatctttgataaaaccccaagagcaccacacaaacacattctcaattgcttttaatatattttcctctgtaaaggacaaaaaatgctgtgcttgaggcaataatcagtggcctagaatgatttctgaagctcttgactttaccataaaagttgtactaagacactgattgaaaattacatttcaaatataccgctcactaaagaaatgtcaacaagctctgggaccaactttgagttattgtccaaggaagactaaaaatagccccccaatagcgatttaattttaagaaaatacaaaagtagcttatttaggagtattttaatgaagatgaagagaactggaaatcagtgaagttttcagcagcctcttcagataagacctaccttaaattgccttcaggtgtgcacattttaacatccagtgaattgcctggaggttgcctggggtttctgctgattatagcaggcggtgaaacctgaactaataattacggccaggaggtgagagcccttcaggacgccaccctgggcgcgctccccgggagcagcccaccgcttgctgtgcttccatcagtcctttattaggtaaagggtttccccccaccccgggtgctttaagaatgcgtttaataagaaatttctcacaggatctaacggaataaagtgccaccaaaataaccttttcgcagttttcgtaattgtgatggagtgggaaaggggacaaagccgtcaaaccgggtgcccggtggatccgcggacctgatcttcctgcacggacccgagagagagtccctagacgaggaagaggggaaaggcatttgtagggtgttaactggtggactcgggaccagagagacagctgcggattcccctcggggtgatgctccgtgcaggagcggtcacggcgtccagaggaacccgcgggtgcaaactccgggagcggcttgcagggtgacggcggcggcccccgctccccggtacctgatgatgtcgtcgctgtggccccggtagaacttctgcctgtgctcccgcgggctgtacaccacgccgacccccgccacgaagtatacgatctccttggccgcagtgtagtagaggttgttgcggcactggtggccccggtagccgtacacccactcgagccgcaggtggcagctcggggcgctccgggccgccatgtcggggcgcccacccgccgctcccgctcgggcccgcggcggcgacgggaggcggcggcggcccggcaacgaaagccctcccgctggctgccgggacttcccgccagccgcgtcctctaagccgcgcccgtcaggtgcatctcgtttcgggggccgccgccgcctcagcccacaggcgggaggaaaaccctcgcctcgcggaacatgctgagggccgcgagcgccgccggctgtcaagtggatgcccagagcccttcgcccgcctcggctcgcctagtctcctcagcccgtagcgcctgggccgagagcgagggcccgcctccagctcctcagccgccgcccgcgcacgcagctcccagccccggtcacctgcggcgctcgcgccccgccgcggctttgtagccacagcctggcggacccgcgccgcgcaccccgaaaccgagcgagccgagccgagccgagccgagcggcgggcgcgcggccttgcgtggccccgccccctcccgcgctcactccgcccctcccggagccgagaagaggctggagttcgcggggccacggtctagttgcggagtcgctgggaccgcgtctctgcaagtgcgcgggccggtgagccctccctcgttgagctgcttaagcccaggcggaccctcggcgaccccgggctcccgctgctttgcgtcctcaaccgggaagcacctgccggttccgcacggtccctgcacccagcgtaggccacgtttttgcctgggaaaatccacaccgggatgctaaattctcttttttacgcttgataccttgtgtgtcttgctgccttatagtgctttcggacccagacattggaatgatgccgagcttcctaaatgtgcttttaaattattatttttagaaacagagcctcgctctgtcgcccaggctggagtggagtggcgcagtctcagctcactgtagcctccaactcctgggctccagcgatcctcccgcctcagtctccggagtagtaaggagtacagttgcgtaccactatgcccggcaaatgttttgctttgtttttaagtttattttgtagaggcgggggtcttgctgtgttgcccaggctggtctccacctcctgaccttcagcagttcttctgcctcaggcctcccaaagcgctgggattacaggcccaatccactgctcctggtcctaagtgtatgttttcttaagtgaccgcaaagctgaaggtagactttagatggtaaactgacatgtgagatctgatttccgaatagcaaaaaaaaaaaaaattgtacttcgatttttttaaaaatgactgggacatcaccaacagttactcttaattaaataaattcaattgtgatcctgtagaaaactcctgtaataaaagtattgggaacaatcaattcctgactatgtcatttcccctcctactcagttgtgtcctcttctcacaggaatatgaacaagatttatcaatacctctaaaaataattggaaatccacaatttaaaaagtgttaagttcaggatggccacaagatttacaacaaaaaaatactaattcaggatataccaatatgaacccttattgtctaaaaattactgtttgatttccataggaaataccaagacagaaatctgacaaaagctaaaataaactaccatcgtttcaagaaatatgactccaaaaggggttgactcctgtgtggtacagatatattggaatagatgttatccaatgtctacttcctcaaagatgccagttactaacttgagacaggattaccgtttcgtctttgattatgacttctaatctgcaagcagtttacatgcaggaaataaaggccatctgaaaggaatttacatagatgtcatgaaaagtaaactctgaaagagtttccattctgggcagaatctgaaaaagaggaatagctttctggcagctgctgcaaataaacaaagaaatcaggcctgagaagtggctctaaggcccatgtagggtaccctgggcaaaagcacacacagtttctctttgtcaccaggagggcgttttctgttttttaataagaatatgttctaattcactagtgagttccttgaaatcccctggtgagaaaaagaaaaattgttgattatttaaattcaagcagtgaacttagaaaacattaaatatttgttgctatacatttgtgatatattaattactggttacatgtaaattttatgagacgagatggaagaatatagttttttctatgtttcggatttttcagcacaatatcttatggatcccatgatacacacttaagtactcagattaataagagatttaagtaatttattttcccattatcatattttccattacgattttaatgacccaagtgtagagtgcgaagcaaaaacattcttaattaaaccatcctcaactggcgactcaagaccaaaagagacagccgaggcacaaaggtggctagaaaatgaaccattcatgaatactagaggaagaaaaaaacaaacctgatcagttcttaccctcacaactttatataatccagtattaccaatgtcacatcagaaagcttaatgaagcttctattgctaggtgatattccatcatctgtatcctgtgaaagtaatgcaaataaggatgtgggagaaagaaacaaaaaattatacacatcaacaaatggacatttgttaagcattccagacgaaggctgcaataccccctgtattcgtccgttctcatgctgctaataaagacatacctgagactgggtaatttataaagaaaagaggtttaattgactcacagttccgcattgctaaggaggcctcacaatcatggtggaaggcaaagaggagcaaagtcgcacatggcagcagacaagaagaatttgcgcaggggagctccatttataaaaccatcagatctcatgagacttattcactaccactagaacagtatgggggaaaccacccccacgattcaattatccccacctggcaccacccttgacatgtggggattattacaattcaaggtgatatttgggtgggatacagccaaaccatatcaccccctttggtaatctagttcctgaaacttgagttcctagtatggaatttgagatatttgaaatatttctaaaattcaggcaaataaatcatgtgctggctactgattaggtacccttaggtttataaagaaatctaaggcaaaatgtagaaaacataaaaaccaaaattccccagcctggccaatatggcaaaaccccatctctactaaaaatacaaaaaaaagtagccgggtgtggtggtgcaggccaccatctcagaaaaaaaaaaaaaaaattcatgcaattacttctagctagcatggtggctctcacctctaatcccggcactttgggaggccaaggtgggtggtcaggagtttgagaccagcctggccaacatggtgaaactccatgtctagtaaaaacacaaaaatttgccaggcatggtggcgggcgcctgtaatcccagctactcgggaggctgagacaggagaatcgcttgaatccgggaagtggaggttgcagtgagctgagatcgcaccaccgcactccagcctgggaaacaaagagtgaaactctgtctcaaaaaaaaaaaaagtatatatatattatatatatattatatgttatatatattatatatattatatatatattatatgttatatatattatatatattatatatatattatatgttatatatattatatatatattatatgttatatatattatatatatattatatgttatatatattatatatatattatatgttatatattttatatatatattatatgttatatatattatatatatattatatgttatatattttatatatatattatatgttatatatattatatatattttatatatatattatgtttatatattatatatattatatatattatatgttatatatattatatatattatatctcttatatgttatatatattatatatatattatgttatatatattatatatattatgttatatataatatatattatatgttatatatgttatacatattatatgttatatgttatatatattatatatgttatatgttatatattatatatattatgtatattatatgttatatatattatatatattatgtatattatatgttttatatattatatattatatatattatatgttttatatattatatattatatatattatatgttatatatattatatattatatacattatatgttatatatattatatattatatatattatatgttatatatattatatattatatatattatatgttatatatattatatattatatatattatatgttatatatattatatattatatatattatatgttatatatattatatattatatatatattatatgttatatatattatatattatatgttatatatattatatattatatgttatatatattatatattatatgttatatattatatatattatatgttatatatattatatatataatatgtatataatatatataacatattatatatatatatctgtagtcttacctttgatcagcctattgtacatgcagagcctaccacagtgcctggtactacaatagctgttccctacatatttatcaaccatgaattagaaaagaaaatgttgtgcacaatcctattgtgttgtgcacaataggattcctcttagttttatcttgaatacttgaaatctttgaaaacttggaagttttctttctttccttctttttttttttttttttttgagacagagtcttgctctgtcacccaggctggagtacagtggtgtgatcacacttcactgcagcctcgacctcccaggctcaattgatcctcctacctcagtctcccaagtacctgaggctgcaggcatctgtcaccgcactcagctaattttttattttttagtagaggtgaggtctcactatgttgcccagtctggcctcaaactcctggacttgagcaatcctcctgcctcaacctcccaaagtgctaggattacaggtgtgagccagcgttagccactatgtccagccttgaaccttatttgatatccaatactgtgttagtcaggacttctttggttgtacgtgacagaaacccactcaaaaggcttaagataaaaagggaattttaatgcctcataagactgaaaagctctagaactggcatcaatgcacttgaatcctagggatcaagtgatgtcatcagaaacaggtcatcaggctgggcacagtggctcacacctgtaatcccaacatcttgggaggctgaggcaggtggatcatttgaggtcaggagctcgagaccagcctgaccaacatggtaaaaccccacctctactaaaaatacaaaaaaattagccgggcatggtggtgcatgcctgtagtcccagctactccggaggctgaggcaggagaatcgcttgaccccgggaggcaggggttgcagtaagccaagattgcaccactgcactccagcctgggcaacagagcaagactctgtctcaaaaaagaatacaaaacaaacacaacaacaacaaaacaaaaaaacagatcatcagaattaactcagttctactttgagtagactccattgccagacaagcaaaacagctgccagccactccaattctatatcccacccgcttagcaatcactgtggaaagagcttttctcagcagttcccctggaaactgttagactttagcctggttaactctgattggctgacttatatgccgcccttggatccatagagtagtgccaggtgcgccaaaaccacaggaagggggagtaggggtggaggaatcctctcaaagaaaatcaaaatagtattaccggaataagaaagaatgggggccagcagggctgcacagggctgacttgggagctgtaacattccccagtcttcatttaccaaaccaaatacacctgcaatctaaatcgtaaaacagatgtttggtaaataaatgcaactataacacagtactctttctaaccagattgccacccaaagatcctcctcaggaaaaaaaaaaaaaaatcttgaagctagtaccagatgccaggcaggcacaaccagcagatgttccctactattaactatattttcaaatgcctattagattccacctaaagcctttaaaaactggtaccatatataattcaaataaaagaaatctctaatcaaattatcttgtcctacacatctgcacaccttgccatcttctctttctgttttaatatcagtattaccccagtgaggcaggttggaaagataggcagttgcctttggttccttactgtttctcacctccaatatttagttaccaagtccttttggctctgttttagaaatattactaaaacgcatccccatctctacatcaatgctttcccaatccccactgccacagttcagttcaagctgtaattatcttttccctagattctgccacctgagttagctgtaaaaaaatcatttatctgatcatgccaattcctctcttttaacaacatttgctataagcaacttaggaataggtatcttgtgccttgaaatattcttatgttttgacccacagatttctcatctggatacctgccacaaggtaataacaaaaaaatgtaaatcaggattcatgttgaaattcatgttcaaatatttatcaaaaggctgggcacagtagctcacactagtaatccctgtactatgggaggccaaagggggagaattgctccagttcaggaacatagtgagaccccattgctacaaaaagaaaaaaaaacaattaaccaggcattgtggcatatgcttgcagtcctagctactcaggtggctgagggaggaagatcgcttgagcccaggagttcaaggttgcagtgaaccatgatcatgtcactgcactccagcctgagtgacagagtgagaccctgtctttaaaaaaaaattatcacagcataacttaggacaataaaaaatatggaagcctaaatgcccaaccacggagaaaaccttaagcaaattgattcagccagtatgacaaaatattataaaccatcaaaaattaggcgtttttttgcagataaattttggcaacgttgcaaatttcccataatagaatgtaaatgttttatagcaggatacaaaaacatatatatagaatgagcccgtttatataatataatgaggactagatcaaaagataccaaaatgtgaacagttttgtaatatgatgggcaattttttttattataccttaagttctggggtacatgtgcacaacgtgcaggtttgttacataggtatacatgtgtcatggtggtttgctgcacccatcaacccatcatctacattaggtatttctcctaatgctatccctcccctagcaccccacccctgacaggccctggtgtgtgatgttcccctccctgtgttcatgtgttctcattgttcaactcccgcttatgagtgagaacatgcgatgtttggttttctgttcttgtgttagtttgctgagaatgatggtttccagcttcatccatgtccctgcaaaggacatgaactcatccttttttatagctgcatagtattccatggtgtttatgtgccacattttctttatccagtctatcattattgatgggcctttgggttggttccaagtctttgctattgtgaagagtgccacaataaacatacatgtgcgtgtgtctttatagtagaatgatttataatcctttgggtatatacccagtaatgggattgctgggtcaaatggtatttctatttctagatccttgaggaatcgccacactgtcttccacaatggttgaactaatttacactcccatcaacagcataaaagcgttgctgtttctccacatcttctccagcactgttgtttcctgactttttaatgatcaccattctaactggcatgagatggtatctcattgtggttttgatttgcatttctctaatgatcagtgatgatgagctttttttcatgtttattggctgcataaatgttttcttttaagaagtgtctgttcatatccttagcccactttttgatggagttgtttttctcttgtaaatttgtttaagttctttgtagattctggatattagccctttgtcagatggatagattgcaaaaattttctcccattctgtagcttgcctgttcactctgatgatagtttcttttgctgcgcagaagctctttagtttaattagacccatttgtctattttggcttttgttgtcatttttttggtgttttagtcacgaaggttttgcccttgcctatctcctgaatggtattgcctaggttttcttgtaggggttttatggttttaggtcttatgtttaaatctttataatcattatgggtaatttttcaactatttttgctatgttttctaagttctttttaaatatacttgttggttgtgcgtggtggctcatgcctgtaatccaagtactttgggaggccaaggcaggtggatcacctgaggttgggagttcaagaccagcctgaacaacatggagaaaccccgtctctacaaaaaatacaaaattagccaggagtagtggtgcatgcctgtaatcccagctacgctggaagccgaggcaggagaattgcttgaacccgggaggcagaggttgcagggagccgagattgtaccactgcacttcagcctgggtaacaaaacgagactccgtctcaaaaaaaattatatatgtgttcgtgtgtgtgtgtgtgtgtgtgtgtgtgtgtgtgtgtgtgtgtgtttgtagctgggtacagtggctcacgcctataatcccaatgatttaggaggctgtggcagatgggtcacttgatcccaagagttcaagaccagcctgggcaacatagtgagaccctgtctctacaaaaaaatttaaaaagcagctgggtgtagtggcacacgcctataatcccagctactagaaaggttgaggcaagaatgatcctttgagcctaggagttcaaggctgcagtgagccagttgtgccactgcactccagcctgggcgacagagtgagactctatatcaaaatacgcacaaacagacagacacacaaagacactatctcaaaatacacacacacacacacacacacacacacacacacacacactaagatgagataattttgtttttcagcattctgcatgggaaaagaattatgtttgtatagaaaaaacaaaatacctgaatgagtgcttggcatagaaaattagatcttaaaggaaccgaatgtggacaataatgttctgcagggagaatgaggaagaatttgttgctccaggaagatgaaagaggaatgaaagtaagagagatggcaaaattgcaagtcctgccatgtagctctctccaaaacctttcaaatcttacataacatttctaaactcatgaaatgttaggtgggttctttcttaaaatggaaactggagaaatgggcttctcatgtgagttgatgtagcaggaagcaatgccacaagaagagaagaataaagtcagtggggagcaggcagggaagtcctggattctaactggtaaacttggagctcaagccacgttaaactctccaagcggtagtgaagttgaaactgacatctcagttacacacacccattgcttttattattagggaaaagtaacaaaagtaattttaaacaaacattgggtagaatctaattgccgtataaagtacaaactcctcatgtgacatacaatgcctcccatctcttttaacagactcacctccagccagttcctccctgctctgaactagcccttctgtgtagacattctagattgctggtaattcctaaaattaaccaggcctttcaagaactgcgtatacatttgcagcctccatgttgtgccttaccctcaaccatccactgtcagcctgttaaactcctacagaatctttgatgtccagcccaaatgaactgccttattatgagttggattgtgttcctcccaaattcataggttgaaatcctaacccctagtaccttagaacagggttcttaaatctgccggccatggactgctacccatctgtggcctgttaggaactaggctgca

SEQ ID NO: 393 - DNA, 27044 bp, Homo sapiens
gccaggatggtcttgatctcctgacctcgtgatccgcccgccttggcctcccaaagtgctggcattacaggcttgagccgccaccatgcccagccgaaacatcttctcaacagacttgtttaggcaaccctgctcagagacctgaaacatctcccatgtgtccctccttctcttcccaggataccctttaataggcagcctcctcctgtgctggaggcattacttctctttcctctgtagccatcttcctgtcctcttcctcctcaagtctactcatggaacttccctcagtacctcccagctgggacatccagagccttccttggcttgaaacttaactccttttcttatccctaattagactgagttctccaagaactggacctgtgtcatcctcgttggttactctctcagaggtgaggtaatagaaccaaccagaattcatcattcactcattcattcattcatcaatacctcctttatgccaggcactggactagcagacccctactcttaagaaatgcagagataaaggcctgcatggtggctcatgcctataatcccagtacttctggatgctgaggtaggtggatcgcttgagcccagaagtttgagaccagcctgggcaacatggtgagaccctgtcttgacaaaaaatacacaaattagcctggtgtgatggtgcaaacctgtactcccagctactgggcctagacctgagcccaggaggtctaggctgcggttagccatgatcgtgccactgcactccatcctggacaacagagatattggtgggtttgttttgtttttgaaacagggtgtcactctgtcacccaggctggagtgcagtagtgcagccttgacctcctgggctcaggtgatcttcccacctcagcccccccaccaccaaatagctgggaccacaggtgcgcaccaccatgtctggctaattcttgcgttttttgttgagactggttctcaccatgttgcccaggctggtcttggactcctgggctcaagtgatcctcccgccttggcctcccaaagtgctgggattacaggcgtgaaccacagcgcccaaagattattatcagaagagaaaaacatctgaataaattaatctaacatgataagtatgattatagcccatgcataaaatctatgggagcagcagaggaagcaaaggattctagctatgaactagatcttaaggaataaataggcggaacacagggaaaggcagtccaacagagggaaacatgccactcacttgggattaagtggaaggacaaagaaaattttaaaagatcacaaaggtatcttcactatcctttttggtataggtcacccgaggaggaaaagaatcttcaagctaaataaaatacagagtactgattccaaaactcaagaatagagaatccctcaagtgagacagcaatcataatttgccttagttacagtctcccttaatccttctcccttctctcccctctctctattctccttagaaacacaatacaaaatcaaacagaaagagtaagagaaagctacacacacagtaagaaaataaactcagagagcttgaaaaaaggcagagcttagccaatctgtctttgactcagcacttaatgtcattcccggttgttatcctatttccttatattgcatattctgcaatgattcagggaagggcagagcttatatgaatgagcagttaagtaaattaaaacacatgcgtgcacacacacacacacccctccaaatacagatttgaaaacactggccaaccacaggaaagccatcagttcctccaagggggtgtacaaggaacaagtgttggttgttaagcatggaaaataaaccagtaagtgaatgacatcatctcagagttatgaactgaggactgtgggcgatgggagggattttgtacatacacatgctgtctcaaaaaaataaaaaaccgaaaaacagttttcctgtccttctcaggtctggaactagttttcctttaacagaagactggacatggactttgctctttgaatcctaatagaaaggaagggagtggtggaaggagcaggttttcctttcattcagaaaatcagatagaacctttctgccccacccatccttccagctccagtctctctctctaaaacagtgtctttgaaaatgtggcccagggactaccttcctcacaatcacctggggtgagggaagaagcacagcagtgcttgttataaatgcagattatgggccccaaaccagaccttctggaactgaagctctgggacaggtcccaggaatctgcatctcaaacaagcttcccgggtaatttcaccccctgtttgacaggcattgtctgaaagcggcatctcaaagcctaagagtcccccagatcccttgaggcgtcttgtccggtggcatcgctgggcaagtttggtagccagcagtaactgctgaatttcaaggagccattaggatcacctacattctcccgactccggaaccccagaacttggaaataggaagaaagttctttgtaagctttaaagcgcagcacattagtcaggggacaatgcgccgctcacagttccactcgggcccacggcgcccgggctgaggattcccgtcccactgagcagtcccaccgccctcgcccctcaggcttcacgcccgacacacgccccaatctctcccgggacagccaagcccccgaccagcggcaccactgcgagacccttctctgaccctctccgcactcacaggctgcccagcctgggcccgctgctctcctctccatgttcctccttcttccaggtttgaatctcccgccgttgggccaccgcccctcaccgtcggcaccgccagacaggacacttcccgtccacaccgctgagaatcctgggatttgtagttcccggccgcggagccgggccgcccaggtgctgggagaagaggcgccccaggccggggcagtaccgctccccttacagcagttcctcgtcttgttccttccaggctccttttctgcttaacagtcttattctagctgctgcccctgccattgcctctgtcatctccacctagtattcccattaacccctactctgcttcctatgtgttcccgagtccggctaacttgtgggcctacttggcgctatgcactaagctaggtgatgcgaatgcagagatgtatgagggcagtgaatgctctaaaagagtttgctgttctggcacaagtgatagacatatagtcaaataaattagaggtcggtgatgcacagagggagggggtcattgctgtgaataagagcagcgaatgacagggaagacgtcctggtggaagtgacagctgatttgggttgagaagtgaaagagaattcatcagattgaagaagagaggcagtgcagtcagtggagacagcatgtgcaagaacgaggaggtgagttcgggaacttaaacttggttcagttttagaggagaacaaagctcagccagggagaggccagaagggatcctggaggcacagggccaggtccagtagcaccttgggcaccatgctagggccctggcatggggtctggtgagcagtcaccagccaaggaacactttagacataggtcagagccagatttgtcctttaaaaagagccatcttatagcaggggattggaagggggtgaggctaggggcagagaccagttggaaggctactgcagtagcacagaagagagataataagagcctgaactaggccaggcacggtggttcacacctgtaatcccagcactttgggaggcggaggcgggcagattaactgaggtcaggagttcaagaccagacaggccaacatggtgaaaccccatctctagtaaaaatacaaatattagccaggcgtggtggggtatgcctgtaatcccaggtactccggaggctgaggcaggagaatcgcttgaacccaggaggcagaggttgcagtgagctgagactgtgccactgcactccagcctgggcgacagagtgagacgccgtctcaaaaaaaaaaaaaaaaaaaaaaaaaagagcctgaactaataaaaaataattatgacaccaacaactatgctgaaaaaatattatctgataggtttccccatcttgtatttctccttttaccctttccccacactccatccaaacaaccaagcagcctaggcttatagcttgggcaggtaggagaggagaatgtgaaagaacagaaaacagaaatccatacctagagccttcagaggaacagaggagactcaggggctgagacaaaactgggaaaagtgtaatttgaagagtggatgcccccctgaagatctgagggattccccttacctctcaccagctgggggagacagaatctagatgttggtggctcctggcaactggggtcccattctctgcttcctggaaaggaccctaggtgtacaggaccctgagaaagaacagttatataattagccaggcagacaatagacagctttgcagaaattcctgacctagacagaaaggaagtatccgaatgaattactcccctcttctgcttggaccctgggcttgaaagggccaggcagatgagaagaaagaaggtgtcagtggacacctttgtgaatagacggctgaggaccagatgagcctcatcttggcctcatatacctccccctacttagactccaccctggggaaaaggagggggcaaatccccagacttgttcacattgtttccatcatcccagtggaatcagggcttgaaacagaagttgagtagagattaatttcttccacaccagagttatggaccaacacacctatagtgtttactataggatgggtactatatttagcatgatcttacaataactatcttatttaatctttacaatacagattagaaactgagacttagaaaggtcacacagctaataactggtagagactagagctaaatgcagatagtcgcactccaagcttgagttcttttttttttttttttgagacggagtcttgctctgtcacccaggctggagtacagtggcgcgatctcggctcactgcaagctccacctcccaggttcacgccattctcctgccgcagcctctcgagtagctgggactacagatgcctgccactaccccagctaatttttcttttttgtattttttagtagagttggagtttcaccgtgttagccagaatggtctcgacctcctgacctcatgatctgcccacctcagcctcccaaagtgctgggattacaggcatgagccaccgcgcctggccttattttttattttattttttatttttttgagacaaagtctcactctgctacccaggctggagtgcattggcacgattttggctcactgcaacttccacctcctgggttcaagtaattctcctgcctcagtctcccaagtagctgcgattacaggtgcccactaccacgcctggctaatttttttatatttctagtagagatggggtttcaccatgttggccaggctggtctcaaactcctgacctcaggtgatctgcccgcctcagcctcccaaagtgttggggttataggcgtgagccaccacgcccggccccaagcttgagtttttaaccactatatactataccacctccaaggcatgagactgcagtacaaagggtatactagaggaggatttcaaaggtagaatcaacaggctgagattgagagccagagaaggagtcaagaatggctcctcggtttctggtttagagactgggttgttggtctactattaacactgagaacgctggaagggtagagttagggaaatgtgagtttcccttggacaagttacatctataggtacacatttagaaattatgagtctgtcagtggtgttaaaaccacaggagtcagtgaaatgttcttagaagagtatataaagtaagaagagaaaatagcaaagggcagcatgttgggggacattagcatttaagaggtagacagagggtccagcaaaagagatggaaatggaattttcagagaaggacagagagagccaggagacagaacgttatggaagccaagtgaaaagagagtgcaaggatgtggtgggtacagaaaggaatcaaacaagaaaatgattcagaaatgatcactggataattgggaggtcattggagccttggtgagaacagtttcagtccctgccctctccctaaatcatcctcccttcttaagggaagcctgctgagtgaaggacaaactgagctgcatatttggccctgaccaggctgtggtagcaccttaaaagcccagctgtctgcagaagctgcagacagctgggttagcctgccttgggcatgggactcaggacacaccaccccaaaatatgactgtaggaaactagaatatgccacctcaaaatatacttctttggcatattttgagcaggttattctgagaaactgcagacacaggagtagcgctgaaaagttgtcctttcgtaaaagaaatttatatctgtaaaggaaatctacattagtaaagtacctgtatcaggaagagggctgctctgagataacttctgtttgtcctagctggacaacctctgttcaccatgcacttgctcccctcaccctccaataacttggatcagcaccacccccgagatgccccaacccctattcctttctgtagctggggatgctgtataaacgtcaatcgtctgacttttctttgagtctcatgtgttacgggactcctgtgtatatgcacatatgtcatgagcctcataacaacgttttggtcaacaacaaatcgcatatacaatggtgatgccataagattataatagacctaaaatattcctatcacctagtgatgttgtagccaccctaacaccttagtacaacgcgtcactcacatgtttgtggtgatgctggtgtaaacagacctaccatgctgccagtcatatatacatgtatagtaatgtcctaggctggatgtggtggctcatgcctgtaatcctagcactttggaggctgatgcaggaggattacttgagcccaggagttcaaggtcagcctgggcaacatagcgagatcctgtctctacaaaaaaaaaatttttaagttagctgggcatggtggcacacacctatagtcccagctagtcaggaggctaagttgggaggattacttgagcccgggaggtcaaggctgcagtgagttgtgatttcaccactgcactccagcctgagtgacagacagagactctgtctcaaaaaacaaaaacataaacaaaaaacagtaatgtcctaggccttcacattcactcaccactcactcactaacttgcccagagcaacttccagttctgcaagctccattcatggtgactgccctatgcaggtgtaccattttaaatctccctttttttttttttttttttttgagacagggtctccctttgtcacccaggctggagtgcagtggtgtgatctcagctccctgcaacctccgcctcatgggttcaagcaattctcctgcctcaacctcccgagtagctgggattacaggtgcgcgccaccacgtgcagctaatttttagtagagacagggttacaccatgttggccaggctggtttccaactcctggcctcaagtgatccacccacctcagtctcccaaagttgtgggattacaggtgtgagccaccgcaccccacttaaatctcttataccatatacttagggtactttgtttagatatgtttagatacacaaataccattgaatgacatttggtgacagtattcaggagagtaacatgctgtccagctttgtggcctagaagcaataggctataccagagagcctgggtgtgtagtaggctacaccatctaagtttgtgtaagtaaacaccatctatgatgtttgcacaatgacaaaatcacctaatgatgcatttctcagaacatatccctgttgctaagcgaagcatgactgtaattaaaatggtttttctcctgctaatctgtcttatgtcaatttaatttgtagcccagccaaagaatctagaagggtagggagaagccattttttcactctgccacagcaccatctgtagcacccagcactatgcctgcacatagcaggcatttagcaaaggctgcaggccaaacgcaggtgagccccgtcacttcataatttttgtttctggcaaaggcctctttacttaaaagaggcctttccctaggcaatgaggacattttctttctgatgcaggccacccttggtgagttggggcattatattcccttcgtcctggggcctgctgtcctctcattaagcagaaactgtaggtcacagatcagtggagttggaaaaaggagtcttgggggagtctcttctgatctccaggcctttcctgactatcaatctttcaccctgttcccaaatgtgaaaccaccacacagaagcacagtatgtaagagagagagagagagagagagagagagtgtgtgtgtgtgtgtgtgtgtgtgcgcgtgcgtgtgcgtgtgagagagagagagagagagagagaaagggttcacttccaggacagctcaagccccattaaagcttgctatcacaggtcatgccgggtgcagtctgtaatcccaacacttcgggaagccaaggcaggagaatcatttgagctcaggagtttgagaccatcctgggcaacatatcaaaaccccatctctataataataataataataataataataataataataattattattattattattattagccaggtgtggtggcacatgcctgtggtcccagctacttgggaggctgaggtgggaagatcgcttgagcccaggaggtagaggctgcagtgagctgtgatcatctaggcacttcagcctagatgacagagcaagattctgtctcaaaaacaaacacacaaacaaaaaaaacaacttgcaatcacacagtgtagtggaagggaccctaggctactcaccttgaatcaaaaaacctagagttggctgggcgtggtggctcatgcctgtaatcctagcactttgggaggcagaggcaggcagatcacctgaggtcaggagttcaagaccagcctggccaacatggggaaacccagtctatacaaaaatacaaaaattagccaggtgtgatggcaggcacctgtaatcccagctactcaggaggctgaggcaggagaacggcttgaacccaggaggcagaggttgcagtgagctgagattgcaccactgcactccagcctaggcaacacagcaagattccgtctcaaaaaaaaaaaaaaaaaaaaaagacggggtgcagtggctcacacctgtaatcctagcactttgggaggccaaggcagccagatcacttgaggtcaggagttcgagaccagcctggccaacatggtgaaaccccttctctactaaaaatacaaaaatgagctggttgtggtggcgtgcacctgtaatcccagctcctcaggaggctgaggcaggagaatcacttgatcacttgagcccgggaggcagcggttgcagtgagccgagatggcgccactgcactccagcctgggtgatagagtgagactccatctcaaaaaaaaacatagagtctaaccccagctacgtgactgctctgtgaccttagttaagtcacatctgctgtctgaggcttggtcccttcctctgtgaaatgaggggatgaagtagatgatttctgagggtgtaactagtaagcgcccctctgatgccttgattcatttcttgaagtgagggacttgagggggtgtgtctgcagcactaccgaggtttagcactaagatacggcttcagagctgtcactcaaataattccctacgactggagggtggtacctggttgtctagtaacctctagggctttgagctaacagcttgggaggtaacccaagccagaggggccattccagagagccagctgcggagaagacccaaggaggtaaggtgtcctgcagtggggatccccacactggatgggggtggtcaggaatgccctggagtggaaggccttgaaaaggcaggatttctgggtgttcttagaagcagggggaatttcttttaaaagagactgcttttcctctgcctgcccctcctaaaaaaggggaaaaaaaggataaaatgggaggggtcaagagcccagggcctgggtcttttccactctttttcccatctcctgggaggagagttcataaaaagcttttgcccttcaaggggaaaaatacaaacaggatatacaagctgctgagatgcttgtattcaggtttaagagggctctggagaccagagcaggaggctgggggcctagaaccagccagcagacagaaagcggaagaaatggagagagagcttccccttgagctagggaaggggcagtaaatgcatgttctgtcccacaccacactccttttcagaaaatccttctctcctggaggttcgctccttgccaattcaggagcctcctcaccctagggtccccagtgcctagtgtggttcctagcacatagcaggggctcactgagtgcttgttgaactgacctgaactacgtcttgagattagatagcaggagtacctagatgatgagtgaggggggtgtctgtggaggcacagtgtgaaggaagttatggaggagaggccctgcatatgcggttccttcatctatttatttgcagctttttttgagacagagtttctctgtcacccaggctggagtgcaatggcgcgatctcagctcactgcaacctccacctcccgggttcaagcaattctcctgcctcagcctcccgagtagctgggattacaggcgcccgccaccacgcccggctaatttttgtatttttagtagagacggggttttaccatgttggccaggctggtctctatctcttgacctcgtgatctgcccacctcagcctcccaaaatgctgggattactggtgtgagccatcgcacctggcctatttgttcaatccaaaaacactcgtatggtggtaacatatacataacatacaatttaccattttaaccattttaaaatgtgcagttcagtggcattaagtacactcacattattgtgcaattaacaccactatccatctccagaactttttcatctcctttcataaacatttattgagaatctactgtgtgccagaccctgcaagttgctccaaatctagtagtggggggaagacaataaagtcatcagctctgacccagtgtgataaatgctataaaagacataggcatcaagtgctatgggaccacaggagtacccagttggttgagaagaaggtgcgttctgaagtaagctgttacttgacttgagtcttgaaggaggactaagaattagtcaggaagttagagtgagagtggatatggtgcccaatgggacagaagaaacaaagtgagagatcagagagcaatccttgaaaccctgagggtcatgctagggcaggggtagagctgaattgccctaagggggtcctgctatctagaggaagccaaggctgacatactgagccctctgttcccctttgtcagccctatgtcttcccccaaccctgaggatgtgccccggaggccagaacctgagccctcaagctccaataagaaaaagaagaaaagaaagtggctgcggcaagaagccagcatccaagccctcaccagggctggccatggggcccttcaggctggccagaaccatgaagccttgaacaacttccagagggccttccttctggcctccaaggccccacaaaccagggatacccctgtgctccaggcctgcgccttcaacctgggggctgcctatgtggagactggggacccagccagaggccttgagctactcctgcgagcccaccctgaagagaaggcacagggcaggcgacacggcgaccaatgtttcaatgtggctttggcctaccatgccctcggcgagctgcctcaagctttggcctggtaccacagggccctgggccactaccagccacagggtgaccagggagaagcctgggcaaaaatgggagcctgctaccaggctctgggacagcctgagctagcagcccactgcctgcaggaagcaagccaggcctatgctcaagagagacagctgcgggccgcagccctggcactgggggctgcggcaggatgtatgctgaagagtgggcggcatcgggtgggggaagttgtgcaggtgctggagaaaagccggaggcttgccgagaggagcactgagaggcgactgctgggtgagaccttcgggcagggaaggcatgggatctggggagacacagagcctgatgatactcagagggctgggtttggggaaccctggaggagtcgataggggctgtaccagcctcatttatatctggtctggctaccagtgaccctggctattccctctagggcacctctataacgatctaggcctgggctactcccagctccagctgttcccgctggccgtggaggccttcctgcaggccctgcccctgtgctgggtgccaggagagcaggccacagtgctaagaaacctcgggatggcccacaatgccctcggcaactatcaggaagctcgggagtttcaccagaaggctgctgacctacacggtgggtgcctggggccggggaatgggactgggactaagacactaagaaggggttccaaaaggggcccaaggcttaagggtggatggccctttgggaccacttatggagcctgaaaatccagaaccagtgggggagagctggaagtgcaggagatgggacagccagacaggacagagggttgtgggcccagaggccgaggcctcagggttgggaaggcagcagtgggcagggggaagggtactggctgcgagaggaggcctgaagcggagtccagcccctctgctgattgtttgtgtgacattgaggaaccactttcactctccgagcttcagtttccacatttttaaaaacggggccattaacacctgccttgcctgcatcacagggttgttgcctgactcaaactagccaggtggaggcactcacaccagaactcaggatggggccaggctgggtgtggagggttcaggcctctcggatgcatctggagtgttctggggctgggcaccaggcctcctgggaggtctgtcttggttgctggagggtggggtcctgatgtcccagcagccagagtcccctctgaggatggggtgggctctgtcctcaggctctgtggggcagcggtgggagcagggccggagctttggcagcctggcctttgcattgagccagctgggggaccacaaggctgccagagacaactacctgcatgccctgcaggctgcccgggactctggtaagcgtgagagggttgggatgtgactgggacagtggggaggctgagggtcctaggggctggcggggaggcagatggggggaactgagggtagggagtgcctctgagggggtggatcagtggggtaggaagtcatgaaaggaccttccaggctctctttctctcaggggacatgaagggacagtggcaggcctgtgagggtctgggggctgctgcagccaggctggggcagtatgaccaggccttgaagtactataaggaagcactggcccagtgtcaggtgagaccccgcacaccggaatccacctctcccctgctatccctcttctggctgacattcctgccttcactccttgtcttctccccatcactcactcaatcagcaaacatgcactggacacactgtgtgctaggtcttgggatactattgtgaggaagagttcatcgctgtccacaattctgggcaggtggtggcaggaccctgggaaaggcatggggatggggtagaagagaggggaaacaaagcccccctcccccctccctttcctgtttccttcttccccaacccccagaggaccataaggtccaggcattccccattaccctattatccaccctcttcccagaaggagccagattctgtgcgagaacggctggtggccaagctggcagacaccgtgaggacgcgcttggcccaggtggggctggtccagactcacaccctggtgagatgacacctgagacaaggagatgggggtggagagaggttacccagagaaggggttggtggtaagcagagacgctgttccctgggatgctgcgcgcttggccgctcatctgtgttcatccgccttgagcctgcgcatgagatatatcactttccaagggtgggaggtgggtgggggactgtggcacgtctccaacacaagggctgatatgtaggtgattaaaaataaagaaataaatttaaaagaatcggtaggccatgtgtgcaaggaggtagaaagtttcaagtccttgactgcagttccctaaatggccacaggatggagatgtgctccaaggaagtccctctctcccgtctttaagtctctggaggtcatttctctgtgggtctccaccgtgttcctccttccaagtctctgctttaacctgtttctacctccgggtctctctgtacgattcgttggctctccaaccgcctcctccttcacattttcagacaaccccagaaaacctcttcccgctccaggaattgaaatgatactttaatatttatatgtatttaataggttttatgcccttgcattttaaagaccatatttaaagacaccatattttaaatctgcaagcaaaattaaattagcctggtacaggcagaggattggattgaggggtcagaatacctgggtcccagccaatgtctgccacctattttctgtgactttacggtatcaggccccagaagggatggggtggtcatcaggcgctggccaggtctgctagtccctaaatctgaattcaagcctgagagttactagcagggaccttaatagaacaaagagcctcaccccagaattgtattctccgagacaagcggcagagcccgaattgtctctatcacataagtctctggagggagcacacacgtagctgggatggccgtttttctcagacctattccctttactccacttcattcccagacttcggctccgggaagactccaggctccaggtggggccagccaggcggaggggaccccagcaaaggcaggaagcagcacagcaggtgtccagcacaggtgagggtgggaatggtgcagcagagatgcatgcgccctctgcagggtgttgggggctgtcgcagtggggtaggaccccatgtgtatccccaggaaggaggggactggtgtcgctctgccaagctgtgccctggttccttgcccctacagatcttccagtgggtgggaagatgaagagtttgaggagggccaccagaagaaaaaagaggagaggtcggcaaacgttccggtgagggctgggccgggaagaccagagcgtgagttgatgtagagtattcctggcggtgcctctccttactgcaaatatggcactcccacccccacccgcctgcctccgcttcttatgcccatcccaccatcccgccttcctgttgtcatttctttgaggcctggcacaacctcgcgccacccctgaccctggctgtcccagttcgcaagtccccaacagccctcccatgatttctgcttgtctctcaaggccctggaccattttccctgaacccttctagaactccctcttccttcctgctctcatggctttcctaacttctagaactttgcatcttggaccccagggttttgctgaaagcctactctgtgcccaacacagcgctgggtgctgttggtaaaccccagctcactactcaatagcatctcccacaaagacttgcaactcagggagcagagttctttgctacttgttgagctgacctgaatttaccgatgtctccttttcagtgtgtttccttccaggcacagtgaatcattcgcaccatctagcttctagttgccccacgtttaccaagcacacgccctgcagagggacagtcctcggcaaagcctccatctatagtgagcagtgcatcccctgacaccgccccaactcgtggttcttctctcagagcttttttccaccatgatagttcttggtgcagagaggcacgtgatgaatgtgtctgtccttctccatctaggtccaggacccagggcccatcttccatttgtaggtccaggccctcccagagcggagtaccctagcatcttggtacccaatggccctcaagccaataggtgggtccttgggggaaagaaggaggcctggagaatagcaaaaaaagtagaatgtgtggcttgggatgattttaatgaaacacgactgctgttgaagttgggggaagctgggatctcatgcttgggatatagggccccgagccccactttgtctttgccctttagcaatgtgaacaaccctcacccggctctggaagcccagggtatgccctgcttcctaaatggcctgatggtaggcctcagtgaaagacagggtgctgcaggatggggggatatgaagcttaagccaactccctccttctctggagcccaccagcagaggtaagggccaaatagggcagagggaagctgaggccaaggcaggctgcctcctgctgtctccccagtcacccccactggcaagcccctccctgcctctttcaggtcatccaggtggcccagggaaagcctcagcaggagccgccagaggagacccatggagtcgggcatctgcactattgtgtgacctccccctgccagcctcagccctcatccctgaagcacctgtccaacacgcacacactagggggtcctggggaccaagcctcttcccagttgctcagccctgcagggatgtggaacacagtgcagccagtggactcctgaggaggctggccaagggctttgcaggctcggccctgagaggttctgtttgttcctccttgggatttttggactcagtaggtaaaagaaaaaaggaaaatggatggcaaattccctgtctttctgaatccaaatcttacgattgctaggggcctggcagttctaaaaactgacttcgtggtcaagtagctttggagtcactgactgtctccagacgtccatttttgcacatgagaaatgaggatataatactacagaagaggcatcttacccaaccaatgcaccttacttctctgtgaaacacaggggatgctgggcgcaggcctaggctgtggcctgtagcctgtaggacagctcctgccagcagccacaggaacagtgatgtgatgtaacatttcccaagtacttagctcatgccccaccctattctaggtgcttagctcaggccccaccctattctaggtgcttagctcaggccccaccctattctaggtgcttagctcatgccccaccctattctaggtgcttagctcatgccccaccctattctaggtgcttcacaagtgtattctcctctaatcctcacaacaaatatatgaggtgctattatcccctttcgcaaatgaggaaaataaggcacaaagcttcagtaatctgaattcccaggtcacataactagtatgtagagaagctgggaatcaaacccaggcagtgagcactttctagaatgctgtgcagttccacttccccagctaagcccttgcttacccagagtccattgtgatttaatatcaagtgtgtctatgcccgttgtatgtgttattgtaattcataatgtaattaaatactatacacattgatgaacaggccaggtgagatggctcacccttgtaatcctagcactttgcgaggccaaggtgggaggattgcttgagcccaggagtttgagaccaccctgggcaacatagtgagaccccatgtcaatgtaaaagaaaatttatctttaaaaaaaaataaattgatgaactgagagtgggaaaagcagcactgtttctataaaaactaagttggatccttagaagactcgactaaggtaagttactttttctttattattcttatgctttatcttccagtgatggaggaaagagtgagtttatttatttattgagacagggtcttgctctgttgctcaggctggagtgcagtggcacgatcacatcttactgcagcctcaaccccctgggctcaagcgatcttcccacctcagcctcccactaggagtacaggtgcaccaccatgccaggctaattaaaaaaaatatatagagagagagacagggtctcactatgttgcccagactggtctcaaactcctgggctcaagccatcttcccgccttggtgtcccaaagtgttaggattacagatgtgagtcactgcacccagcctgtgagtcactttatttttttgtttgtttgtttatttatttattgagagggagtctcgctctgtctcccaggctggagtgcaatggcgtgatctcggctcactgcaacctccaccttccgggttcaagtggttctcctacctcagcctcccgagtagctgggattacaggtgcaagccaccaagcccggctaatttttgtattttcagtagagatagggtttcgccatgttggccaggctggtctcaaactcctggcctcaggtgatccgcctgcctcggtcttccaaagtgttagggttacaggtgtgagccactgcggctggcctctgtgagttactttaaaaagctaccgtgggctgggcacagtagcttatgcctgtaatcccagcactttgggaggccaaggtggatggatcacttgaggccaggagtttgagaccggcctggccaacatggcgaaaccctgtctgtactaaaaatacaaaaaatcagtggggcatggtggtgcatgcctgtaatctcagctacttgggagcctgaggcaggataattcacttgaaactggaaggtggaggttgcagtgagccaagatcatgccactgcactccagcctaggcaacagagtgagactctgcctcaaaagaaaagataaaagctgctatgcaattagatgtgagcaacaagattattacaaattgggggaataataataaaaatataaattctgcactcaagattgcttcaaacatgccattaactgtttcactttaaggaagcaaactggaaattgcgggtgatacataactggtgaggtttatgtaagaaagaagatgaggaatctaatcacaggctccatcctcaaagaaaagaccctggccacactttgacagatggaaaattaatgtattttttaaagttgaaataaaataatccactcctgatcatgtcagataagagaaagtagggaaggcaaaactttacctccactctcttagggtctctagctgggacagagaattaaattgacataaaacagattaacaagagaaaagcatacagatttacttaatataaattttatgtgacacaggagccctcataaagcaatgaagacccaaagaaggaaaacctaaatgttttgtactaggtcgaacaaagagccaattgtggaaaagcagctaaaatatatggggaggccagtcgcaggggctcacacctgtaatcccagcactttgggaggccaaggtgggtggatcagttgagcccaggagtttgagaccaacctgggcaacatggtgagaccccatctctacaaaaactacaaaaattagccaggtgtggtggtgtatgcctgtagtcccagctactagggaagctgaggcaggagaatcgctcgaacccaggagtcagaggttgcagtgagccgagatcatgccactgcactgcagcctgggtgaccgagtgagactctatctccaaaaaaataataaaaataaaatatatggggaggctaaaggaagataagagatattttaacaaggtctgtttgtacagaattctctcagcttcgactccctgtctctggtgataagaatgtttctttcctcctggaggaaggcattcattgttcacatgggagttttgtttcctgctttcaggaagaaaaggggaggttagagcactcttcttatacttaccgtttttctttttcttttcttttttttttgggggggggggatggagtctggctctgtcgcccagactggagtgcagtggcatgatcttggcacactgcaacctcctcttcccagattcaagcgattctcctgcctcagcctcctgagtagctggggttacaggcgctcgccacccacgccctgctaattttttttgtatttttagtagagatggggtttcaccatgttggccaggctggtctcgaactcctgacatcaggtgatccacctgccttggcctcccaaagtgttgggattacaggtgtgagccagtgcatccagccctaatttttgtatttttagtagaggtggtgtttcaccatgttggccaggctggtctcgaactcctgacatcaggtgatccacctgccttggcctcccaaagtgttgggattacaggtgtgagccagtgcatccagccctaatttttgtatttttagtagaggtggtgtttcaccatgttggccaggctggtcttgaactcctgacctcaaatgatccactcaccttggcctcccaaactgctgggattacaggcgtgagccactgtgccctgccaagacctcgcttctacaaaaaatatgaaaattagtcgggtgtggtggcacgtgcctgtagtcccagttactggggaggctgaggctggaggatcacttgatcccagaggtccaggctgcagtgagccatgatcaggcggctgcactgcagcctgagtgacagagcgagaccctgtctaaaaaacaaaaaaaaaccttccctttacctgtgtcttagcttgggctatcataataaaatatcatagattggatgctcaagcaacaaattaatttcctgacagttatggggactggaagtcagattagggttccagtatggtgacagagaggaggggcagtgagaggaagaaagtcttataagggcactaattctaccagttcagggactacctcttatatcccaactaatgctaatcccaaccaccctgtctccgaataccattacactgggggttagggcttcaacatatgaatttgtgagggaggaagggaagggaacacaaacattgaatccatagcagtctggataattatctttatcttagtgccttgatggtaactggtttgttactctccaaccttttcccctaaccacgcaagagagtgtgtttgcattctcaaaaccactagcctaaactctactcctcctctcaagacttctagtgaaacatcatcgtgacctggagcctatggtttcaattacgttttaaaccatagcttacccaaactatttaaggataattttatatttccatagctattatctcagtaaaggggttaagcatgactcgggaagtacagcatgataccctggtaaaacagaggtaggggaagctaatgtagtgtagagggggcctaagttacataggcttggtggtgtaaataagaacagtagcttaatttctataccacgccctctgcgacggtttgcaggcattagcacctatggaagtatgtactcgtttccctgttgtataggcgaaaaactgacaccagcagttcccacattcactcagccactaagcagtggggcaggaatcaaggctaactgctatgccatccatacacctttctgaaagagttacaaaatcagcacttattatcaaagggccgttgggagcaaggcatttcggcgtatctggaaatgtgtggcgatctgtaaacgctcctgaggagagctggaatcccaagtggaagggaagctggaccgggtgggaactgctccccagcccaagggctgctagaaccccaagactccagccccgagcggcttccggaatccgcgcgtgctggcccggcctcttcgggggcggggcgagcgccgcacatgcgccggggccgggccgggccgggggcgcgcgctctgcgagctggatgtccaggctgcgggcgctgctgggcctcgggctgctggttgcgggctcgcgcgtgccgcggatcaaaagccagaccatcgcctgtcgctcgggacccacctggtggggaccgcagcggctgaactcgggtggccgctgggactcagaggtcatggcgagcacggtggtgaagtacctgaggtaggcacgggtctcgggtggcctgctctgccccggggcggggcctgggacggccgggccacctgcgcgacagagaacacgaggggcgggactcaggccgcgggttttcctcagccaggaggaggcccaggccgtggaccaggagctatttaacgaataccagttcagcgtggaccaacttatggaactggccgggctgagctgtgctacagccatcgccaaggtcagtggcacaactctcgacctttgggagcagccagggaggagtcactgtcccagccccctggcctaggcacaaaggggtgggagagacagctgggccaatatggtctattaccgcctgaaaccccgccgaaccacccttgactctgccttcaggcatatccccccacgtccatgtccaggagcccccctactgtcctggtcatctgtggcccggggaataatggaggagatggtctggtctgtgctcgacacctcaaactctttgtgagtatgtggggaggggctgtgggggaggagggcgtgagggctctgggatctggggttgaattaccactttcttcctagggctacgagccaaccatctattaccccaaaaggcctaacaagcccctcttcactgcattggtgacccagtgtcagaaaatggacatccctttccttggggaaatgcccgcagaggtaggtggctccagttgaatacctccatcctacagtaaccactgcctgtgctctgctcttccttcgtgtttccaggctgagctcattttagtgcctggtacggaaggtgcctaacggatggtattcgaataagtgtgcaagagccttctcctccttcataaagtgtgctccatgagtcccacacaccaccttctctaaagcttccttgccctttcatctccctggtccctccttccactctgtagtcagatcctcttgccctagcatgcagtaaacacatgatctacccctcaggggccggagtggctgccctatctgaaacccttcctgcagatgcatggattaagggatgggaaattgggtaatttttttccttaacccattttacagatgaagatactgaggtgcagagaagtggtttgcttaaagtcactaaattgtatcatggcagagctgaaaccagaatctggctctcctgactcgtctcaggctatctcagcctgtagcctccccagtggtgggcaggcaggcaggcaccgagaacaaaaactgtctggtctcaatttggcctgaatcagtgaccaactcacactttctctaggcctcaggctgccctctgaatgagacacaatacttgtgcctctgagaatggtctgcaggtgcagaggacagccctctccagttaaggctgtttgtgcagctgctggctctgacatccttttcctgctccaccacagcccatgacgattgatgaactgtatgagctggtggtggatgccatctttggcttcagcttcaagggcgatgttcgggaaccgttccacagcatcctgagtgtcctgaagggactcactgtgcccattgccagcatcgacattccctcaggtgctgggatccagaaggtggggtgggggagattggggccctaccctcctgactcttgcccacaccaggtctaaaataattttagtctagaggggcagaacacagctttctggacccccatcagggctggggaacagtgttcagaagtcccctttacatgttggccccatgaagagaccacggcccaagggtacgtggagctcgttggacgagagttcctcaggtgggaactgaggggacttcccactcctctgggactagggtaaactaaggtgtagaaggggacgagacatctggcctcttcctgaacaccaccctcttttcaggatgggacgtggagaagggaaatgctggagggatccagccagacttgctcatatccctcacagcccccaaaaaatctgcaacccagtttaccggtcgctaccattacctggggggtcgttttgtgccacctgctctggagaagaagtaccagctgaacctgccaccctaccctgacaccgagtgtgtctatcgtctgcagtgagggaaggtgggtgggtattcttcccaataaagacttagagcccctctcttccagaactgtggattcctgggagctcctctggcaataaaagtcagtgaatggtggaagtcagagaccaaccctggggattgggtgccatctctctaggggtaacacaaagggcaagaggttgctatggtatttggaaacaatgaaaatggactgttagatgccaagtgagttgtgctgtcctttacacaattcttattcatttgggacacagacagggagctacttctacttatcagtgtagcaagactacaaagaggttaaccgaaggaatttcttcaaaggcctccaaggaatatcttctaatttgtattcaggaccttcccaggctgggaacagagatgccagtcaggatttatctctaggctaggagcgcaagctcatgtttattcattcatttggtagcgctagaaactggcaactgtgggctaaatctagcccatagacctaaatttatgtttttcttaaccttcacaatatttagaaatcagagcacttcacataggtctacattttcagcttcttttagcaggaatgctccttcaaagggtatctgcattcctgttcccacagcccccagcattccttgtcctttagctgcctggcttctctaggcacctgagttcatggtcctgggttagaagctgcagaaaggactgtgctgactccctcaactaaggggtggtactaccgcttgctcctctcagcagctgacgtcccagagatcagtttcctttctgggagggactcctcattgaggggggtgcagaagacctgcagacctgcatcaaccctggtctttgaggcttcaactcctgaaaatcaatcaattgagccctacctttaccagacctttagtctctcttcttctgtttctttttggctttctggacagtgctgactccagctctttccttcttgggatgctgctgcctcttcctcttacctctgctgcttgagccagtgtgtgctctgctctctgcttccctagccccgccatccttctcatcccttacatccaagatgtcctcctcctcttgatgctgctgtcttttcttcttgcttttcctgcttcttccatcactgcatgctctgctctctgcttccctggttccaccacctaaaagtttcctcacctctatcttctaggttcaagtcctcctcctcctgttgctgcctcttctttcttcggctgcatgggtcagcatatgccctgctctctacctcctctgtcctgacactgcctgcagcctccttgccttttcctccttcctccaagacccccatcttctcctcttcatggtgccacctcttctttttcttccctttcctgagggactgattggtttgctctctgctattcaattccccaagcccacttgttcctgcagcgtcctccttctcattccctttagttgtaccctctctttcatctgagacctttccttcttgatgtcgccttttcttcttcttgctttttctgatgttctgctcagcatgttctgggtgcttctcatctgcatcattcctttcagatgctgtagcttcttcctcctctttctgcctccttttctttttcttttttttggggggcttgctctctgactgcagttgaggggccccagggtcctggcctttgagacgagccaggaaggcctgctcctgggcctctaggcgagcaagcttggccttcattgtgatcccaagacgggcagccctgaaacagacagggtccaagtcaaagcgagggtatcgggggaaatgggcctagtccttaagcctgcagggaaagttggtggagggtaggagtggggagctgcctatcttcaggcaatagatgggtaggtaataggaatcatttccctggggtaaaaagaaccaagaggtggcacaggccatggtcaaaggtggggagaaaagggagctcaaggagctgaccactacttacttgtgtgctgttcgcccctcacaggcttggagcagcatctcatcagtcagactgttaggggagatcagcagttacaaacagacctggtggaaaggcttgacctctcctccttctaaaacattccttcaacactgaattcttgttcaggacctggcactttttgaggtactagggatacaaagattagtacaacacagttccacccacccccaagaagcccccagtcaagcattagatttagccctttctcttgccatctgaagacatctcttcccacattccccaagagctaaaatgaagtctcacatctttggggacttggacccctggttgtcgtcatcactgcagctctccaagtctttgtttggcttctctccacctgaagtcaatgtagccatctaggaggggtcatgggggtagataaggccttctcaacaccatcaccatccctattcccttgtggaagccccctaagaatttatagctccaggcagtggtttgccagcccccaccattgctccttgaggagccacagggaggtgtgccatcctgcatactcgaacttggataggagatgggctgctgctgctgggatgtgcagcagctttggcctctctcacccacagctggctggtgagcagaacaagaagaggaaatgctctggttcatcaggtcttcacagtggacaag

SEQ ID NO: 394 - DNA, 82568 bp, Homo sapiens
ggaaaccaaattggtaaagaggaagtcaaactttcactgtttactgatgatatgattgtatatctagaaaaccctaaggactcctccacaaagctcctggaactgatgaaagaattcagcaaagtttctgtacacaaaattaatgtacacaagtcagtagctctcctatacaccaacagcaaccaagctgaggatcaaatcaagaactcaactccttttacaatagctgcaagaaaaaaaaaatacaaaaaatacttaggaatatacctaaccaaaaaggtgaaaggcctctacaaagagaactacaaaacacagctgaaagaaatcatagatgacacaaatggaaacacatcccatgctcatcgatgagtggaatcaatattgtgaaaatgaccatactgccaaaagcagtttacaaattcaatgcaattcctatcaaaataccatcatcattcttcacagaactagaaaaaacaatactaaagtgtatatgaaaccaaaaagagagcccacacacccaaagcaagactaagcaaaaagaacaaatcatttggaggcatcatgttacctgacttcacactatactataaggccataggcaccaaaacatcatggtactggtataaaaataggcacatagaccaatggaacagaatggagaacccagaaataaacccaaatagttacagccaactgatcttcaacaagtcaaacaaaaacataaagtgggaaaggacaccctattcaacaaatggtgctgggataattgtcaagccatatgtaggagaatgaaattggatactcatctctcaccttacacaaaaaaaatcaactcaagatggatcaaggacttaaatctaagacatgaaactataaaaattctagaagataacattggaaaaacccttttagacattggcttaggcaaagacttcatgaccaagaacccaaaagcaaatgcaacaaaaacaaagattaatagatgggacttaattaaactaaagagcttctgcatggcaaaaggaacagtcagcagaataaacagggagaaagtcttcacaatctatgcatttgtcaaaggactaatgtctagaatctacaaagaacttaaacaaataagcaataaaaaaaaaaaacaatcccatccaaaagtagtctaaggacataaacagacaattctcaaaagaagatatacaaatggccaacaaatgtgtgaaaaaatgttcaacatcactcatgatcaggaaatccaaatctaaaccacaatgcaataccaccttactcctgcaatggccataataaaaaaataataataatagatgttggtgtggattcagtgaaaagggaacacttctatactgttggtgggaatgtaaactagtacaactactgtggaaaacagtgtggagattccttaaagaactaaaagtagaactaccatttgatccagcaatcccattactggttatctacccagaggaaaataagtcattatacaaaaaagatacttgcacaagcaggtgatgttaataacatcacaattcacaattgcaaaaatatggaaccagcccaaatgtccatcaacatcaatcaatgagtggataaaaaattgtgatatatatacaggatggaatactactcagccataaaaaggaatgagttaatggcattcacagcaacatgaatggaactggagacaattattctaagtgaagtaactcagaaatggaaagccaaatatcatatgttctcactcataattgggagctaagctatgaggatgcaaaggcataagaatgatacaatggattttggggattctggagaaaggtggaagggggctgagggataaaacactacaaatttggttcagcgtatactggttgggtgatgggtgcaccaaaatctcacagatcactgctaaagaacttactcatgtaaccaaatacagcctgttcccccaatagcctatggaaataaaaataaaataaaatagagtacaaaataattctgcaaggcagaagctattattatttcaattttgtattttttattaaatgtattaacagaaaagtgtacatatgttaagaattctcacaagtctaagacatccatgaatccacaacccagaacaaagaaggaatataccagcaccccaaaatccccctaccaagttactgcctacatctaccctagtgttaaacattatcttgacttctaataacatagatcaatcagtagttttatactatataaatggaatcatatgggaaatacatgtatatttttatgtctggttccttttgtttaacattttggttctgagatttatccatttgaggatacagtagatagcaccttttctaaatagtattgcattctgtaaatatgccataatttatccattcaactatttatgtaaatttgggttacttacaatttataaaaatcattgacatctgcttattttcaaatatttttttcacacaaaacctctacctagatgctatcattaacattttactatcgttttcttactaatttttaaatgcttcaattaacctaatttttcaacaataggtctccagaatgtattcattttgcataactgaaactttgttgcctttgaccaaaacctctttattttctcttccctgcaatcccctagcaaccaccaccattttactctctgtttccacttgtttgactgttttaaattccacacataaatgagaggatggagtatttgtctttctgtgtctagttatttcactccacataatgtcctccaggtccatccttgttgctgtcagtggcaggattttcttccttttttagactgtataatatgtcattgtatgcatataaagttgagccttaaaaaagtgggggttagggctgctgactctctgcacagtcaaaattctacatataacttgactctcccaagacttaactactaataccatgttgtgaactgaaagccttaccaataacacaaatagatgattaacacactttttttattatatgttatagaccatattcttacaatagagtaagctagaagaaagaaaatgtaactaataaaatcataaaaggaggaaatatatttactaagtgaaagtggatcatcataaaggctttatccttgtcatcttcattttgaaaaaaggaggagttattcttgttgtctcaggagtggcagaggcaaaagaggtggaagaagtggaagtggaagcaggaaaggcaggcaaactttgtgtaactttatggaaatgcattgtaatctctgatgttttcttttttcatttctctaaaaatgtttctacacagtaccaatctttctttccccatttgctttagtttctctgcccatatcatagaagggtccatgtcataaaagaagtcaaaagcagtcttgaataatcagaacccttctgccagattgtctaatgtaaatttgttttctggcactgcttcttctctatcttcttcctcataatttggcactggttcagaagccctcttctccatcaagtcttctattaatttctctgctgtggtgtctattacctcttgaatttctgcaaaattcatatctttaaacctttcactccttaccttttttttttcttttgccatatccacactcttccttgattggctccattgtaaatcctgtgaaggcatgcacatctggacagttctctgcagcaggaatttattgttttatgatcgatggcattcacagctatttatacaacaacaaatgacatcttcagtagtgtaattcttccagacttttatgatgctctttctttcaggggttctctatctggattctcttccagagcattgacaatcttttccatatggtaatgtgtgtaatgagccttaaagatccttataacccctgatctagaggccaaattgagttgtatttgggggaaagaagatgacttctacctcttcactgttgaactcatgcggttttgcatggctggggcattgtccaatatcaaaagtacagtaataggaagttccttactggcaaggtacttcctagcttcagggacaaagcatccatggaaccaatccagaaatagagttctcattgttcaactgaggttctcttgtcatacaaccaagagactggcaacaggtgtttctcttttcctttcaaggcccaggagttaccaactttatagataagggcagtcctgatcataaacccgactgcatttacactaaatggtagagttagcataccccttcctgacttaaatcatggtacttgcttgtcttccttactaataaatgtcctttgtgtcagtttcttttatttaggacatttttgtctgcatttaaagtgcattcagacagatatcctttcttctcaatgattttcttaatggcacctgggaattcatctgctgcttctaggttggcagaagctacttctgtttcctgacatttttaaaaccaaaactttttctaaaattatcaaactgtcttttgctgccattaaattttccagctttaactcctttacttccctttggctgtaagttgtcatataatgactttgtttttttatgaattatgttatagtctataagggtgcctttcctataacaatcttgcacctacataaaagctacattctcaatacagaaagatatttttcaaaaagtgcaaggtttttgtccctgttggcatagatgcagtgatggctatccaaatttccttttctttctttacaatgttccttatcctatattcatttaccttgaaattgtgggcaacttcatctgcagacctcaatctgcagtacatatcaagcaattcaaacttttcttttagtatcatgacttttctttgcttcttgtgagcccttgcagttcactagtagcacttggtgtgtgcttcctattgttattcaaggtttacagtatcgcactaaatacaatgaagaatacacaaaaaccgtgagagatctctttttactgcaatacacaatttactagagtgatgaactgctcacatggaaatgattagcatcacatggcattttaagcagatacaacactggagctcattacataataacaggaggtggctatgaaattatcacagtagtacagtatatacaattaattttatgtggttatgatttaatactgcatatttatgcttatttacatttatctccactgtgaatggtctcatgtatggtctgcaggtgtttgtgtgtgtaaattttaatacattttgacttctttcaatagatttgtgtatattttatggtagtatataataaaagactattatccacatatatttatgcatgcatggtatatctaactttttcttaatgtttttaacgtttctaggttacacagtttacctgcatgttttttcaaattatcacaaatctccaaaaagttttccaacatatatattgaaaaaaaaatctgcataggagtgcacttacatggtttaaacccatgttattaaagagacaactgtactgcttttgaaaattctttcatcagtgaacacttgtttccatatcttgactactgtaaataatcctgcaatgaacattggagtacagacacctctttgaggtactgagtttaattcctttggacatatattcagaagtgagatttctcgatcaaatggtaattctacttttaattttttaaagaaacctccatattgttttctatagctgcaccttttttacatttccactaaccatgtataaaggtttccttttctccactttctgaccaataacaggtctgagctgacatctcattgtagttttgatttgcatttacctaatgattagtgatgttgaacacattttcatatacctgttagcaatttatatgtcttctttgccagttttaaaatcaggtaatttattttcctattaagttataggagttactcatatattttggatactaatgtctgctatgatttgcaagtgttccccaaagttcgtatgttggaaacgtaatctccaatgtaaaggtgttgggaggtgggacatttaagatataattaggtcgtgagatctcgatcctcatggaaggattaatgctattttcaaggggggtaggttagttattgtgggtgttagttcctaataaaaggaagcatttggcccccatgatggttaatattagatgatatgatttggctgtgtctccactcaaatctcatcttgaattcccacatatcatgggagggacccagtgggaggtgattgaatcaagggggcagatatttcctgtgctgttctcctgatagtgaataagactcatgagatctgatggctttaaaaggcagagtttccctgcacaagctctttttccctgacatccttgtaagacgtgacttgctcctccttgccttctgccatgattgtaaggcttccccagccacgtggaactgtaagtacattaaaccccttttcctgtataaattacccagtcttgaatatgcctttatcagcagcctgaaaatggaataatagagtaaattgataccaggaatggggtactgctgaaaaaatacctgaaaatgttgaagcgactttggaactgggtaacaggcagagtttggaacagtttggagggctcaaagacagaaaaatgtgagaaagtatggaacttcctacagacttgttgaatggctttgtccaaaatgctgacagtgatatggacaatgaaatccaggatgaggtggtctcagatggagatgaggaacttgttgggaactggggtaaaggtgaccccctggtggcattttgcctctgccccagatatttgtggatctttgaacttgagagagatgatttagggtatctggtggaagaaatttctaagcagcaaagcattcaagaggtgacttgagtgctgttaaaggcattcagttttgtaggggaagcagagcacaaaagtcaggaaaatttgtagcctaacaatgtgatagaaaagaaagtcccatttcctgaggagaaatgtaagccagctgcagaaatttgcataagtaatgaggacccaaatgttaatctccaaaacaatggggaaaatgtctccagggcatgttaagaggtcttcatagcagccactcccattacaggcctggaggattaggaggaaaaagtggtttcgtgggctgagcccaggatcctcatgctgtgtgcaacctaggaacttgctgacctgcatcccagccgcttgagccaaggtggaaaggagtcaatgtagatctcggaacatggctttagagggtgcaaacctcaagccttggcagcttccatgtggtattgagcctgccagtgcacagaagtcaataattggggtttgggaacctccacctagatttcagaggatgtatgggaatgcctggatgcccaggcagaagtttgctggaggggcggggccctcatggagaatccctgctagggcagtgagaagggaaatgtggggtcagagtccccacacagagtccttactggggtaccacctattggagctgtgagaggaaggccaccatgttcctattggagctgtgagaggaaggccaccatcttccgcaacccagaatggtagatccaccagcagcttgcacctgcacttggaaaagctgtagacattcaaccccagcccatgaaagcagctggaagagaggctgttccctgaaaagccacagggggagagctgcccaagaccatgggaacctacctcttgcatcagcgtgacctggatgtgagacatggattcaaaggagatcattttagagctttaagatttgactgccttgctggatttcagacttgcatggggcctgcagttctttgttttggtcaatttctcccatttggaatggctgtatttacctaatgcttataccctcactgcatctaggaagtaactagcctgcttttgattttccaggctcatacataaaagaaacttgccttgtcttggatgagacttttgactgtgaacttttgagttaatgctgaaatgggttaagacttgggatggttgggaaggtatgattggtttagaaatatgaggatatgagatttggtatggtccagggacagaatgatatgttttggctgtttctccacccaaatgtcaccttgaattcccacgtgttgtgggagggacccagtaagaggtaactgaatcatgggtacttttccctgtgctgttcttctgatattaaataagtctcacaagatttgatggctttataaggtggagcttccctgcacaggttctttttgcctgctgccatccacgtaagacttgacttgctcctccttgccttttgccaggattgcaaggtgtccccagccacatgtaactgtaagtcccttataccctttttcctgtataaattaactagactcgggtatgtctttatcagcagtgtgaaaacagactaatacattagatatcaacttgattgcatttaaggatgcctggatagctggtaaagtattgtttcttgatgtgtctgtgagggtgttgccagaggagattgaaatttgagtcagtggactgagagatagagacccgagattgacatttgagtcagtggactgggagagggagacccaccctcaatgtgggtgggcaccatccaaccagctgccagcacaactggaacaaagcaggtgaaagagggtgggaaaaactggcttgctgagtcttctggcttccatctttctcccacgctgaatgctttcttctgttcctactgcctttggacatcagactgcaggttctctggcctttggactcttggaatcacaccagtggtttgctgggggctctcaggcctttagacacaggctcaaggctgaactgctggcttccttgcttttgagactgttggattcaaattgagccactactggcttctttcttctccggcttgcagacggcttatcctaagacttctccatttgatcacgtgagccaattctccctaatgaatttcctttcatgtatacatatatactattagttctttccctctggagagccctgactaatacagattttggtaccagtagttgttctagaggaacagagttttaaggatggatttctttagctggttttggggtttctggagttggctgtttaatctgattagatccaaaaatgctaaggactctatttctaatagtatggagaacactgatagttttttatgtgaattgtttagagagttatgcaaaataaatgcatttgatactccttattaactgctcctgagaagcaaggagtttagtgtctctataaataatacctttgaccatatgtggagaaccaaggaatataatgaagttagttgatactcctaagttcactgaacaaagtgatgaaagaaaaggatgagcccagggattctaactcccatgggcagactttgagactctattcagatttcagccataagaattagacatctgtggccctgaaaccacagatactagtaatagtgactcaaagagtagaaaaaaaatcacatttcaatactgaatcattttcaggtctgtggtgtataactacacaacaagattctattataagcaatagcatgttccttccacttcaaattataacccccatcagttcaatggtaagaatttttagtaaatacagtggtgggtgtattctttttgtgagcctagaagggctcacttgcttatctggatgctttagccagtcaaggatatagataaggatgccattgatatgaatttgtgagattattttatcctagtctcacttcttagtgagtagacagaacttcaatttctaacatttgttttatgaaaattcctcaacttacctataaaaaaggtgtaatcagctattatttccttttagtaataagattacattgaaactactataatactttaagataatagacaggaataatataatcatcttatgacatattagtttattacatgcataaaactataaatgataaaaatgaagaatgtaatgaacagtttatgtttttttaaaacaaagtcagattttaaaagttgtacacggagagcaaaaatcactttacgtactcatgattggctttaatatttctttacactatacatactgaaaatgtttacatttactaataaggaatgccaagcgtatccatcaccatttgaatagcttgcaggggatttgtgatttcttccatgttatctcttctcaaaacccaatctggcttaagtctgttaaaaaaaaaaaaaaagtctggcattaataaagttcttctctttagagttaccttcaccttttttctcttaactaaattgtagctactcctgaacacatcatttcccttacaaactgctcaaagaggtgggagaacttcatattattgcccatcactagttccagactatttctctccatcctttctaaaaaataatgctggcttctttgaagcttatgctatttagcttgaccactgccttttggtcatcagccaaactctcagtgtcttattccttgtaaacctggttcttgttctcctcttacctactgtcaccgttctcagcaacagcaacatctatgtggccaaaaagccaacaacctagtccgtttttgccccactttccttcaattctacctcaaccaatcctttttaatatgatcacatactagactttgtcatcatcagaaagtgtgcgaccactgaaatcttgagacttccattctccatccaccatttctgattcatccatgtcatatgctctaacacagtcattgaaccagttcttctaccccactgagatctccacttcatttggcctcaacacatacccaacatccaccagaatgctgtccttactttcctgtgtatctagctcaggtgcatcagtattatcaaaacctttgcaaatgccattaactgttgtctctctctcctaccaaactagtctgaagaattctacttggatttcaaattgagtcaaaatatctgccttctccattcctatacagctgcatattactaaaaatgtttacacaaccaagctgattttattttttgccaataattacaaatctaaaatgagcatttgaaattgccagcatgctccctttctctccaagatgactatcttggtcctttcctcttttcaaacttcccctccataccctctgagctgcttctgagttgttgagtttataatctcaaacttattgagaaaatagtatcaaaccgagggagttcatgcatcttctcacataattccctactatatgcatttccatcatcttattttgtcctgctaaaaatccaaagatatatcaattggtgagtgaacaaagtgtggtacgaccatacaatggaatagtactaagtgatagaaaggaatgaaattcaaatccatgcataaacatgaacgaatttcaaaagcattatgctaaggaaaagaatccagtcacaaaaagctatctactatatgattccatatatgtgacagtatagaaatggcaaaactaaaggtacaaaaatcagatcagtagttcccaaaatccagggaataaagaaagagaactgacaacaaaggggcataaggaaactttgtgttacagaaatattttgtatctcagtggtggtagtttcctaactgtatacatttgtcaaaacgaattgaattgcatacatttaaaggatgcatttatactgtcagtaaattttacctcaaaagcctgacctacatcaaaattttaagagaatccattcatatgttagtatgagcttttaaaacataatgaatattaaattctaccaagtccttaaaaaacatgtagaaatggtcccattaatatatttcaagcaaatgaactttacattatgctgtgaaatatgcatgcataaaaccaatttataactacattatacagtttataattatgagtataattataaagctaatggctgtgtaaccactcaggtcaagaaatagtgtgttgtcaataatgtaggatttgtacctagtatagagaattgctaagtctcaagaaggaaagaaggaaggaagggagggagagagggagaagggggaagaaaaaaaggaggagggagaaagaaggaagggagtaaaaacactaattaaatgccatgacggttcaccaaaataaattaaatctttttgccaataaaatcagaaaatgtcaatctaaatttccagaaggagaaatttcaagaatcagggtgattatgggaggactggaggttgatattttggctaagaaggacttttggcacttcttaaacagtgtagtttgtctttcatgcaaaataaaataaataaaataaaatgacaaaacttataacaagcttcttagccttagctcttaactatttaatataagaagtttgttgaataactattaaatgtccaaagctacagtataatgttatttctttatttaccaagactgcttcttttaaatttaccaaacattccattcttattcatatgttgtttctccactgaaaagcacatcttgtttatggtaagtgctcaataaatatttgttaaatgaatgaatgaacagtgacacaaatttatggactatatttaattgcttaccttgaaactattctggtccttacaggtgtttctgggataaaaggaatgcttatagaagaattcttcttttgcttgtaaagtattctttcagtattcattttatgtttatgagctgtaagtttgtagagactgtaaatacggtcaacaactttggacctacttcgtacatcctacaaaataaaatgcacagttactaaaaagtaataagaattaaaattttatctcttttagactagcaaaatcaaatataataaaaactatgcagtaaaccttttttttttcttttttgagatggtctctcttgctctgtcgcccaggctgaagtgcagtggtgcgatcttagctcaatgcaatctctgcctcccgggttcacgccattctcctgcctcagtctcccaagtagctgggattacaggcacccgccaccacacccggctaattttttttgtatttttagtagagatggagtttcaccgtgtgagccaggatggtctcaatctcctgacctcgtgatctgcctacctcagcctcccaaagtgctgggattacaggcgtgagccaccgtgcccagcctgcagtaaacttttaagctttgaataatcaaagaaacctcaccaagtttggcaggtagattgatttaaattacgagctaatttgcaaggcaattataaggaagataaatattcaaaagttgcatacttaactccacactgaatataagaaggaattattatagtcaacatagcaattatagtcaacacacctatcatatccagttaccaagtcttgaaaagtttacctctgcagtttccaaagtcttctacttacctctcagcgacacaatcctaagacaagcacaatctcttgcctagatcactacatatcaacacttgccaccttctttgatggtctcactatatccacacatgctctcccaaattcattcttcaatcagaagccagagtgttgttaaaatttaaattggaaaatattattcccttgctttaccctgcagcggttcccacttaccaggataaaggccacagtccaattatggcctatggtttccccatgttaattatgacacttaaaaagaatgactcagaggtctcatcgtagaaaagcttgaaatacaattatggttacaacaggaggataagaagttatacctatctggttttctatcttgctaggatacttttctctctagtaaatgggaaatggttacttatatggctgtaataaatttattttcagaattcagtttctttaatagtcagaaagaaacaactcatagatacatcctgaattcattttatccgtgcaaaaagcaggtttgaacacacataaaaccctattttagagtgataattactaaaggaaaactataaaagtcatagacttaagaccacagaaaaataatcttaaagaaaggcaactgactaatacttacagaggctctatttgttgtcttcagtaaaatagccaacaaacaacaagtttttgtaaaaatgcttccgcctttgtctgcaactttattaccaggcttttctcggtatatctgcaaaagctccaatagtatatctatacaattttctacatcataaactgctgaagtagttttctcatacttgaagagaacagaatgaaattaaaagttgtaataaacacatacatttacaaacaacccaaccaaaaaaacaaaatacaaaagtccatacttagtatagccaaatttttggaccacctgcagcaagtgcaaaggactttgtgaaatagctttgatattatcattatttacggatctatcatatatgtgtattcacattttaatcttaatcttttccccctaattctaaagtttcacataaaataaatcaaatttaaaacctctgaaaacaaacatcttgaagtcaataaaagcaaacttttaaagataagaccactttagtaagaatctctaaggaaaaagataacttatctgtggtattattaatcataggtaagataatgataaaggcaggatctaattagttactctattacatgctccttgagaggaagaagagcttgctcgaaaataaaacaaaatacatatgatgctagtaagtctaggatatattttccacgcctcatttttctaattgtattattagattcatagtgaaatttgcatggtaacaaataatgatactaagataaaaataacaaaacaacatagctgaccctttgtatggcatgtttatgtattaatgtgtattaactcaatgtgtatagtaacagttttgagtactgttactatactcattttatagttgcagaaagtaaagtacagagaagctaagtaacctataataagctactgagctgggattcaaactcaagcagtttggcctcagatctgtgttcttaaccactacctctcaaaataaaaatattgggtaaagcgctttaagttgtcactgaaaggttgagtaggaaagagaaatctttcaacctttggttgcatacaatatagtttggaatagtccaaggccaaaagacaaattctgatacacagattaacaattacagagtaactaagttatagcaatatttttctttcacacactttgctagacatgattataatgtggtaatactattttgatataatgcagtagataacatcaccacctctaaaggcagacagaaatgaatccaaattcaactctaccacttatcacactcaggttcttacaggaggaacctaatttctataattattattattttttctctataaaatgggaataataatatgaactactttagaggattattatgaggattaaacaatgcatgaaaaatactagcatgtagtaagtacttaataacttttaatcatcattgtttttaatattattaatcatcattgtttttaatattataaagactgaggaaataatataaaaattggtacttaaatctacatttatgttaataaacattttttcatcctaagactcttgcacataaatgaatttaacttagagatttaagccctagtgatgagtaaacccaaacttaatttgcaggggcatatttgttgaccagtgaatatctcattaataaaatgaaaaactaccttagatacattaagcaagacttgcacagcatatctgatgacttccatacaaggaatactgcgattacaacttcggatcaaaacaaatattttagaaattgctccactctgggccatgttctcacaacaaagtggagacaatctagtaactacctctgaaagaaaaaaaaaacacacacacacaggtaaatttacagcaacaaaatgaagttttagctaataatgtagtattacatcattctttaaacatgttaacacaaactaacctaggtgttttaaggcctcaagaatggcagaaaggtgcttatatgtcaaaaggtaatgaagtgcaagtgcagttcttttgtagagtttgttttcttctcgaatctccctattaacaacttgaagacttagtcgtatagctttaatttttgtacaatcatttttcttcctccaagaatagcctctccataatgccttaaagagataaaacagagtaattttaagattatagccaatgttttctatttatatctacatctgttttcacaatgtaaacattttcagtaaatttatttgacatgatcacatacatttcaattaaaatctcaagttcaaataaatagcaaaatcaactttcaaaaaaagaaatacagataatattcctatatgtaaactggacagcatttatcgaccaaagatgtctaaatttattcaaaatgttaaaatatttttacttcttgattataaacctcctctagagcatttgaaaataaagagcttagcaatgaaattatggtagtatagtgcttatgagttattctaccggctaatgcgttagctttttaaaatggtaactatgtttttatagtgttagatatcatgtagatgaattgcaaactaaagttttgaactaaaactatacaagtttcaattacctgaattttaatgattccactagtgaatttttcctgctttttacggaggagaaaatggcgcactgctttctgtattactgatgcagccctatttcgctggctcagacattcttgaccttcatgctcaatctttttgatgctatgatatttctgaataaatctcttttcttgtaatcttgctcgaaaccatctctgtttaaaacatagaattttgtttttcatttctacttcaggtttttttaaaaaaatatacaaatatacatttatacataaatgaaagaaatagaacagtatatcaagaaatctttcagctttccacagaggcattacttccccactccacttggtgcaaaaacctttccagtccatgttgggtgcctgtgtgtgtgtgtgtgtgcacacacatgcacaggagtatatttaatcctggacaacaatgtcttcattttacaattctaccaaactgcatgtatcattctgcattttttttactaaatactttatatgtaaatgtatgttaatgtatataaacaaatagaattcttcttcaaaatacataaagaactcctataaatcataacaaaaaagaacagccaatggaaaaacgggcaaagtgtatgagaaaaagatgttaaaaaaaagtacacagataagaacttgaataaccaacatatagaatataatttcagaatcattagccatcaagtaaatccaaaacaaaaatgagatgctatttcccattcattagaatggcaaaaatcagaaagtcttctgatactttatgttggcaagcatgtagagaaacagggtaccctcaagactttgctggcaggaatgtaaatgagtacaattacatcagacaataattcacaactttagtactgtgccataaaacatcaatctatttctaaccctcaaatcattgtaacagctataaggtgaaaggctaaatgttgtacgaccttagcataaagcatttggaaattgtttattacatatcaaaaatttctaacagaaaaattatatcatatagttttactgcaaagaagaagcaaacctgaatacagatgactgaattaacctgcttgttagcattcttcacagccaggtaaagtttataggctctttgaattctaacagcattcaggtgataatatgcagctgcagtgaagtgaagaagtcgaattttggctctctgttctaaaaactaaaggtgaaaaaacaaagcatattcaagtatctgcctcctaagttaatcaatgagtgtttttttttgtataacctcaacatcaaattatataaactagcaagaataaactaatttttaatcattacaattacttatattgtaattcaaagtaattacaatattgtactatacaatatttccagtagtgtaactcataactcagagtgtagaaagcaaaattatattttgggtactttactaaataaccatagcttctaattcaactagactgccctattagagaagggtataaatattaaactcaaaaaatgttacagaattccaagcagaactcttggaaatggtgatattaaatcagaaaaagtatatgaattaacttctctactattaaatagtacagtgcaactccagcataagaccctgcagaaggagctttctacagttgctgttgggcttcagactttcacttgatgtttaataaacaaaatacaaacattcctcctatttaacttcaaatcaaattgttttgtctatgccagtacttcacatattgtaagcttgaatatcatgacctccctaaaaataattctctcttgctgaagatgtggaagctgtcacaggaatgctggttgcaacacctcaaaagttgcttggtggtggcaaaaagctactagaataacatttaacctctttcacatatggagcctctctctcatattttcagttcctttgttaagattcattacaaaagagaaattttattttgcgtctttggtggtgaacccctgtgagaaatagtaggactaggttcagagaaaaaaaatttgacagtcagtgctcttgtcacttacctttctagcagctgaattaattcaagttaatggtcatattagttctgaaattattctctaaaatccaaagtttcttaacactatttaacatcaagtgctttcattttataagaatgagatatgctacttgaaaatacttactctttttcgtactagccaaccacgcaccagtgcttgtaggataactgtagattttttaaattcaatatattttatcctttcatgctttccagcctccctggctcgtatatatttttgtatgatcaaagcagcagatttctgccgaagaaagacctgccttcctttatatcctctataatgtgcttggatcaaacaagcagctcgatgtctctataaggaaaaatttacaagtaacattaatgggtagaaagaaaaagatttccaacccactagaagttcttgaatttctcaatgagatggcataattatgatttatagtctaagaatgccatgtttcatagatatgaaatgatgatgaagcattatttctaaactcacataggtctatagccaagatgaaggtgtaagccaagggtcaagggtcaatagatacctggtgctctttccctctcatcctcttgatacttttcattgtgagagggaaaaggactaacattacaggacaaatacatttaataaaaatgctagctacaatagaaagagcacggtgatcataaatagctatgacagaagctgtctgtagcttgaaaaaacatagcataccactagcacaccttagattcctcaattacgtaacaacctgtgagaattaccaaaatgagacagagccacaaagtgagcacatgatgctggaaatatggcaccaacagacttgctcaacacagggttgacagaaacctttaatttataaaaaatgcaatatctgcaaagcaccataaagcgaagtacaataaaacaaggtatgcctgtacagttatatatttttaaaaactagcaaatagtatttttatgggagaatataatttttaattgactgaaatagatgtgtgtgaaataaatgcatacttaggtcttaaaaacactttttttccagcgaaggatttatttttaaaaattaaaaaatacaaaacattctttgttttctatttcctaaagtagttatttgcaagtgaattaatttttaatacctacttttatcattaagaagtgttcatgagctatctttgcaggaagtatagctctccattttctctgaatgataattgctgatgctctcacattcaaaaacctaaaaagtagttattggaaagcaatgtcaaattactttaacttattcaatgagtatttattgcctccccccctttaaaatattagaagagaataaaatataagaaaggcaatgacagaattttaaaaagtgggcaagtataattcatagttaagttctaacaatcagaatttacacacgcacacgaaagaagttttacaattggcaatattccagtgggtaagaaatatgaagttctacgattctaatatggcacagaattttgaacaggatcaaaataaagtatggttacccagatctagacaaaaactagataaagggggaatggtagaaataatggtaaaatataagatttgagtctgcatggcaagtgagtctttgagcagacgggaggtggttaagaagagaatgtgattacaagcagcatcaggtacttcctttcatttgaaaggaaaaatagatatcatcaaaatatctaagtagagatatttcgtaaacagaactggagaaaaattttaaaaaatctgagcactagagattaaattttagggatcaacataatactaagagataaaatgtgagaatggacaggttttctactctgttcttgataatgtggaaaaagtacaatgagtagcttgttttgttgccatgtttcttagaaaataggaccaaacaccattgagaaaaattcagcatctgttacaggaaaattagatactggtccttaatagctgatagtagcaactgtatctttatatgctttttaatttttatttttatggatatataatagttgtaaatatttacagagtacatgtgatattttgattcaagcacacaatgagtaatgatcaaatcagggtaaatgggatatccatcacctcgaacatttatcatttccttctattaggaaacttctaattctattcctctagttattttgaaatatacaataaattattgttaactatagttgccctattgtgctactaaacagtaaatcttattccttctcactgtatttttgtacccattaaccagcctgtcgttatccacccctcccctctccctatcctagcctctggtaaccaacattctacttctatcttcatgcgatcaactgtatatgttaagccctgcttctacccatgggcttcatccaaaaattcctctcacactagtgtgccttcctaaaccatctttaaaaccatcattgattcaataattcatcaactctgggagctgaagaaaaattcttatactatgaacttaaaaaaagatgatctggtaacagcttctgaaaatgtgtgtgtgagaaataagctaggaatagtgaaatacaattagcatagacaggttggtaattagggtcttcatcattaatgacaaagagtatgaggaataatacaaagttcaaagaaaaaaagaatgagtaagaaaacaaattttgccagtagttaagtcacccagcaaaatggcccaaagcactaataagaaaaccaagtcttaactaaatgattttattcacttcctacgtctctgtccttactctaatccttatgaacctgaattaatcaagtatataatatttttagattatattaattaaaggctatgctctatctcaaaaaagcaagacagtacgagagatgtattttgtttccttaataaagaaaatatcaacaaaaccaaccatataaattaagcataacaaatatttaaaataaaaatcaataagcagtgttattttatgtaaagacttagctatcacacacaaatacttttacactctccacagaactatgatacattaccgtgttctctctagtttggtatagaagcaaccttgaataattttaacagcttttaatatagctagatattctttgtgtgctctccaacatctataccaggcttgaatcttgcaggcagctttcactttacataaatatttcttggctctatatctcctccacatagcctattaaatacataaatataacaagtatgcaatgagttgtctctttttttttgtaaataagacaaatcagtataaagacagttaaaataaggttagtgcagacaaaaataaattgcatagtcatatcatgactcttttagactttgacatgtaatgagtcttctgagaacagtggtgcttactatagtgaacacgtattatgtgctttatcacacataccttatggctggctgccagcccagcctaacaaaaccctaaccagtatttataaattgtaagacacacatgtctgaaaagccccacattatgtaaattatcctcatcacctcaatccatttggaagaaaagaaaatgaacacattgacctactgcaggttctggggagaaagaggaattcttcccaatccatattcactttgggttctgtgttcagcctgcaggagaatcctgagagctcctgtgataggactgtcagactttctgattttgacaaccttctggaagactaaaggtttacatgacagctacaacttattgaactaagcactaagaagattagtccttaataatcacatgggtagataatactattatctctaatttagagatgaggaaatcaaggcctagagaaattgagtaacttgttgatgtcacacaggttaataagtggcagagttgtcttacttaatatttataaatatcttataaaatggttaagatctctgttttataaaaaaggaaaaaaatccaaaattgaaattaagaaggacttgttagcatatagctgttaagtgacagagtcaagatttgaacccaagtctatttgactccaacatccctacaggaagaggaattaaaagaaattaaagactgtgtaagcaaaaactcagttgtatgtaagaaaacccaattccccttgggaagagaaagggctggagtcctttaaaattaactgtgtttttctctctgtggctagtgagccttatctctccctttcccaggcattgtgaagactgtttctctagctgtgcagctgcaaggacactagacagataatctcaagttgtaaaacatgttgttccttaaaaagtaagaaataatgtaatgcatctcttacttgaataactgtctttgtttctctcttctgtaatacgcttccccctgcacagatctccccatgccccacgaaatgcttaaaaggtagcttgactctttgttcagggctcagtcctctttggatgttaatccgactgggtcggtgcacataaataattaaataattcctcctcaaatccctcggtctctctgattccttaattatcccgcagcacaacaaatactataggcacaacgtatatttagattaggttctaaattcagttgataatgcaataattatatatggccaaaattactctgagatgaccttaactcattcagactatattgtatacggtttttatgtaaatctgcatacattatttatgtatatccccaatacctgccacctcagtcttaatcagtggtagaagaatggtctcagaactgtttgtttcaattggccatttaactgtaacagtaaaagactggttaatggtaacactgcatcataaaaccttcaggaggaaaggagaatgttttgtggaccattttggtgtttttgtttttgttttgcttgtggcagttataagttactagtttttaaaatcagtactttttaatgaaaacaaattgaccgaaaatctgtcacagaattttgagacccattaaaacaaagttttaatgagaaaattatatatatgtatagatatacgtgtgtgtatatatatatttacaaatatatatatatatacacacacacacatcacacctgaagaacatcaaaatttacagacattgacaagagaagccaacatagcgttaagagggaaagaagacagctaagagattatggtatcaagaaaccaagggttgagagaagaaacaaagtgtgcttaaatcccaaatgctacagagaagttgatatatatatatatataaaacatacatatttacatatatatgtaagtatttagtaatgtatactatatcccagtggctcccaaacttcgctgctcattagagtcacctgggagctttgaaacaaatcccacgcttgtgttgcttcccataccaattagaatatctaaaggtaggagtatgttttaaaattccaggtgactccaatatgcagtaaagttttagaccactggcataggctaaaaattatatgtgtaaaatacaattttattatgtaattatgtaagagaaaaaaatttttataagattgttattttggctatttaatcattttaagtgaataaaaccataactaatacatccaatgaacacctttcaattgtgaacttctcagtagtgttaggaatttgataccataatctcttacctttcttctttccctcttaacaccttggtttcttgataccattaatctcttacctttcttctttccctcttaacaccttgttggcttctcttgtcaatgtctgtgaattttgatgttcttcagggctcaagtcccaggccctctttgttcactcattttatgtattgttccttggtgatctcattattcccagaactttaattattagcatatgcccataatgtacaaatcaaattctaatactcacactactctcctgaactccagacaaacatagtcaactgccttactagatatttcaagggggttacctgctaggtacttcagatcttatatactccaaactgaattcatcatcaatctcaaaacctgctcttccctctttattccctatgtcagggtgtgagggagtaactctgctgagttacttaagccatcaacatggcttgcctccttgttcatgctctatataatgccaacttacaatcccattgtcacaaacctacactgaactataactctttctcacctggcttactgcctattttcatttggtctacctgattctagtcttgctccttttccagtccatcttccacattcctgccagagtaattttttttttttttttaataaaaatgactgtggtcttctcctgcttaaactcctctagaatttgttttgtctggagcataaagactaaattttttctgtcttaaaaatctatccacaatcttactccctctattgccaacctggtcccatatcactttttattgtttctagttttttgatttttccacgttatctcttgcaattggaatattcttctataccttttactgggctatttctaattcatacttcagtgtaacatttcaacttaaatgttactcactctgggaagtctctgaccatggagactagcttgatttcccattctgtgtttcctgaaacatacacttctcatgttgtattataattatacttccttgttcaattaagttccttgaggacagcaactaagtatatcttactcattgtctatttataacacccactacagcatttggcacatttctagcacttgacatttcttgaattaaaacattatttctaaatttaacagtaatccagtaagatatgaacatatcacatctgggttaaagcctgggttattgcaggtaaaaagaaatagctgaagtacttagattcagttcctggatctgcctctctctatgcaacattggccaaattacttaaactttatcacttccttcatattttaaaagagataatactgtacattcctcacacatttggcaaatagacaaaacaaaataatacaaaattgatttggaagccaaagtactaaacactcagaataaagtatgtctactagcctaagcagcaaacagctctggttaatagattattagaggaacaaagttactctattttgcctatattatgccaaataatactttatcttagcttatattttccacttaaagaaataactttgccaaatacaggactcctattttctcaaaattcttctaagagtgctacaattaacccatactgaaatgcaccacacatagggtgaccatggccagaacaatccccgttctgtgctgtcttggctgacttactagtgccctttccctctttcaaaaatgttccactttggaagataaatggtcacctcaactaagtactattctttatgacctgcttaagctcattttatacattctaacaaatattggtcaaaagaaagactcacagttttatatttaaattaaatatagaaatacctgaatttttatggtgctatttttaatttcctgaaacttccgtttctgtataaatcctttacttctagcttgaataatgataacactgcttctgatctgtaaatagacttgtctttgatgttttgcagacagaaatgctctgtagtgattttgtaaaaccactgctgcttttctatatagtaaaaactgttttctggtttgccacgtcctaaaataatgctgtaaagtgatagcagctcttttctgctgaacaaatcttctccgatacacagccatctgaaggaagaactgaatccgtagggcagcacatttctgtgtttccagttttcttgtgaccattctacaaaaagctttttgaattgttactgcagccctactttgagaatgatactctgcttcctgtgaacaagcaaggccagaagctttataccactcttgaatcataacaccttcactttgaacagcttcatactgagttttacttctgtaacagcagagtgcagattggttaacaatggctgccatcttttcctctgatacatttttcaatttttgtctaactttcatgcctctaaaagcagcctgaatagttcgtacagatttctgaactgctaaaaagttttttctttctgtttttactctaacatacaacctataataattctgtataaccacaattgcagttttctttgtttcataatcaactttggccctgtgcattcgatagaatgactgaattagtgtggcagcccggtgcatattttgaatatcctttcgtactttaaagcctctgtaataagactgtatacaaataactgcttgggtacgcactgcagttagttttctgtatcttctttgaatagaaactactgttgctctaaggtggagataatgcttccttattttaaaggctttacaatgcttctgaataataatggcagcctggtgctgttcctgaatctgtttttttatgttcatgtcctgaaaacctgcctgaacacaagtctctttcttaagttcattgtgttgaaatactttctgtttctttttatttgctctatatttttcttgtatgatttttgtagcccactgaagcttttggtagaaacaatactgcctatacattctgtaggtgctttgtattacgatagaagctttgtgtttttcccttaaaagttgtcttgctttcattcctttatatgcagcctgaataaccacagcagaatgccattgtctgatataattttctctttgtaattttgcagctctatatgttcgataatgttgctgaattagaattgaagcatgtttccaagtctgaaatgtaatatatgttctgtacatcctgaaagtagcctgaatgagaactgcagccctttgcatttcttgtaacttcttctttaccatcagtcttctgtaagatgactgtattgtaatggctgcctttcttaagtgcaagaattggtacaatttatgtttggcacaaatggtggctcgatatttcctctgaacaaaaatagtagcttttttgagggaaatgaatcttctcctcaccagtaatgatctaaacctactctgaataagggttgcagaggaatgcatactcttcaaatgtcttctagttttcatacccctgaatgcagcctgaaggatcacagcagagtgtctttgtctgagataatgctgcctctgcagttttgcagctctatttgcttggtattgctgttggatcacaacggaggcctgtttcaaagcctgatatctcatatgtaatctgtgcattctgaaagtagactggatgaaagtagcagccctgtgcatctctcgcatccttttccttatcatccatcttctgtatgatgactggattttaataactgcattttgtacctgaaggaactgtaagtgatgctttgtacaaagatgtgcccgatattttctctgaatcaaaatagcagttttcttgagagagaggaatcttcttctcatcattagagttctaaatctcctctgaatgagagttgcggctatatgcatcatttttaaatgtcttctagctttctttcccctaaaaatagcctgaatgtatattacagaatgcctcagtttgttatacctttgaaattgtatgtttctttctttcattgcccagtatctttgctgtactgtttttgttattttctttaacttattaaagtatgtttgctgtctgtatcttctgtagtttgactgaatgagtgttgctgcagtctgcatctttctaagagtccgtctaactcttactcctctaaaacttgcctgaaggactttaacagctttcaaaattgtcaggtacttttcacgctgcattttaccttgataatatgctctacatcttacttgaataacaatagctgcttttctcattgtatggtaacttattcttgactgatgcattttaaacatggctttaataaaagtggctgccctgtgcatgtgttgaatatgtcttctaactctaatacctctataaacagattggattttaattgctgtcttcttcaaattaagatactccttatgctgatggtttgtaattttaatacctcgataccatctctgaattataatagctgaagctctataggttgcatatttctttttggttttgtaagctctgtatttagactgtatagtgactgctgctttgttgcaatcctttattctttttctcactttcataccacgataagctgactgtaaagttactacagctgcttttgttttcaaatataaatgattctgttctcttccaatactgtaagccctataatacttttgaatcagaagagcagcttttttcatgattttccacttcttttgttgcacatgcattctatagtatgactgtatgatgatagcacatttatgttgcctttgaagctgtcttctcagtgtttttcccttccacatagattgaagcaccagtaccgcatgacggagttcaatatactccatacattgcttccttcctgcagtccatgctctgaaattttgctggatgactaatgctgctgttttaaacaatctaaactgtttctgggccttggccattctaaaagcagactgaatcttcaaggcagcttgatgttcccttctaatctgtttccgaaccttccagccacgataagcagactggagggaaatcacagctgcctttgtcttcaaaaaatgtgttcttgtatcatgaagagtcttgtacgccctgtaccatctctgaatctttattatagattgaagcacagattgatattttacccttttattatagcctctaaaagcagactgaattttaagagcagctatagattgttgtttgattagctggcgtactttataacctctgtaagctgcttgcaagcaagtagctgcttttttgacttgcaagaagttcttcctctgattgacctgtgctttgtatgcatgatagtaattctgaatgacaataattgctttatacattttcagataatactgccgagcctttctcattctgaaataagactgtagtgaaataacagcttttctttgtaacctcatctgctttcggacaaggtatcctctaacaaatgcttgcagtttgatacaagattcccgcatctgcatatactcttctctcttttgtgcagctatttttttggaacggtaacattgctggataaatagtgcagctgctcttaaatgcaaatattgtttacgtgtttgtttcatcttaacagttgactgcaattttattgtagcattttttaggctcaaaaattcctttttagaaacataagcacgataatatgattgaatctttataacagatgtgaggatgtgaatatacattttcctggcttgcatccctctatatgcagactgcagcacaatgacagcagagcgtgttttctggtaagatgctagaactttcatggcaaaaatataagctcggaaatgagtctgaattataacagctgctttcttcatcttcttatatttctgtcgttgttgatgttttcttacatgtgcctgaaatttgataatagtcttcttaaggtttaaaaatcgaactctgtcttgtctcattctccagtatgactgaataacacaagcagctctaatttgtctacataaattatgagctttcagtctcctaaaagcagcttgtaattgaatggctgcagctcgtttctgcaaatagttggtgcgctcaatctttcctttcagatatgctttgtagtacttctggatggttagtatggactcttttcttcttttatataacttttgggcttgaaagcaccgaaatcttttctgaatgataacaacacaagatctaatataaatatatttccgtaattctttatgcattctataccatgattgtatgataatagcagaattttcttctttagcttgttttcttaaatgccattctctaaaagctctttgcaatattactgtagcttttacttgtgattgcattttacgttgcttccattttctgaacatagattggattataagagttgatgattttagcatttcatatctttgttgatcttgttttcttcttaaataagcacgccaatgcctctgaattgtaactgtagcccaaagatatcgtttataagatgtaacagcaattatcattcttatcctagattgcaggatgattgaataatatttcaatttcagaaatctttgtctagtggaatatcttctccaatatccctggaaaaggtaagaaaggacacaaagtaaaataggcatagctttctatatttaacacttttcaaaatactaatttttctaacattctgcttaaaaataaacacattgaattagaaaactaattatttttgtgagatatttgtctcttttgtttttagtttaggttttacattgatatacctgtagccaattcagaaatccatccaaatcttcattatatttaaatactgcatttgtatgccagaatcataagaaacataagcaagtttatgttatattacaagcaaaagagtcaaaataaaactatagtaatattctttgctatctattgattctaagtaatttcctatgagtttatttctgggccttatatggtccccttacttcaatgtttctaagctaccttataatgactagaaactgtttatgtgaaggatcctgcattatcacattacaggcctgataatataaatataggaatttaggaataaataaaccagatcactctcagagtcattattttcattaagaataaaattacttccttttcccaaatttaggaactataaatacatggcttaaaagtagaattctagaaagacttgagaaatgacaaaacttttgtcttttgaaaagccatggttacaatggctaatccaactgtatgttggctcaacaaaaagagctacaaactctcaagctaattccagttgctggtatctaaaatggtcccaggctaatggtagtcaagttctagatgttttagcaataagaccattcctttgtacaaacactccaaacattgctgagattgggggtggcatggagaggttgttctctactacatcttactttttctcgcatataagtagagtaatatagggactgggtacctcgctctcctatagcagtatcgagtttgcttgcagctatcactggcctaagcatacctatccatgggtgaggaagcttaaggagaacatgcacatcccttttcctgacccttttcctgtaagttttattgtcttcttcctctactaaatgttacctgaggttttgttcatactcttcaacctgacaggaaatgattgtatacattttatcttaccaagaagagatgcacaagttgtcaaaatatttatccaacaacagtcaaacttatttgtacaaaagtattttgaaaacaataaactctacataaagtattaacttgctttaaattagggcaaagtaaagcagtaatagtactcagaaattcagatattatttttcttttgagcacccacccccaacagatatttctatgtaaaatcctcaaactaagaaattgaagaatcagtgtgtacagattgttttatactttaataatcactttttctacattactattactactccattactgaaatgttaatcaatgttgatatataacatggaagatatgatcatctcctctcctaacagttttgcttattacaatagcaattttttcaccattgtcatacaattcttaaaaataaatagcttttactaaggaacacattacatacaattttctcacttaattctcacaaaaatacattaagttggcattgtttcttcacttaaagaaaggaacactaatgttacaaaactttttgcaaagtcccacagcaaataaaaataattgatcttaggatctacattattacaccaaaatcaaatgttctttctactctaccacagatatctgcagcaggttgagtgcattaacagcccaattcttcatctctcccagtaactataacctgtgccatactttgtttttcctcatacaaaagagtttctctgcttgagatatgggcgcagtcatggaaagaatgcagtagagcagtgtaactcaatcttcagttttctggtcagatgatgaaacaaggcagccctgaggaactagagggtaccagggagatggtagagactggggagctcagggaagcaatctgataatgttgtttatgaatttctaggttcaccaccaagttgtgcacaatgtgaatctagaccacagtaggctatagactttaagaattgaataagatacagatcacaatctagatcccagactggctactgggtgttacataatgaaactgatatgatacaaatatcactcactgtaaaggctttcaaaaaggaactgtcactgaagctacgctcatggaaggctgatgagaacaggtggcctgaacccaatcaagtgaattagctgctaaaactaaaatatcaacattctccataggatttaaacaaaacatagagtctgataacataacattaaatttccagaatgcaattaaaaattatttgacatacaacataacagaaaaatttcaactctcacaagaaaagataatcaatagacaccaatgatgagatgacaaagatactggaattggaattaactgacaacgactttagagcagataaagtaaaaatgctacaacaagttgaaactaatggaaagataaaaagtctcagtaaagacatcaaagatatgagtaagaaccaagtgagaatagtagaaccgaaaaacacactaaccaaaataaaaattcactggtatggcacaatagcagaatggagatgacagccaagatggcaaatatctcagctttgtgggccaattctgttgcaacaagtcaattatgctattgtagtacaaaagcagctcccaaataatacataaacaaatagttgtgaccatattctaaaaaactctatttataaaaacacatggtaggccaaatttggcctgcagatataccaacctctgaccatgatagaccatattgtggatcataaactaaaggttatcaaataggaaagaattgaaatcacagtatgtgctctggtcataatggaattgaagaaaaagtcactaacagaaaaataataggaaaatctccaaacatttagaaagtaaataacatattctgaaactttaaatcatagaaaaagcctcaagagaaattaaaaactatttgaactgaatgaaaaaaaaataccatatcaaaatttgtagtatgtggctaaacctgtatttagaagaaaatttataccattaatgtgttacattaaaagtggaaggactcaaatcagttactcaagattatacttaaagaaactatagacagaaaagcaaaattaatcaaaacaagaaataataaagactgagcagagaccaatgaagccaaagggttgtccactgaaaagatcaagagagttaaaactctagcaagactgacaaagaagaaaagagaagatacaaattatcaatatcaggaatgaaaaagggaatatcactacagactacccaggcatcaaaaggatattaaagatatactttgtatatacatatggtaaattcaacaacttggatgaaatggaccaattcttcgaaaattagaaactgccaaaactcatcaaagataaatagtcctatacaaatttaaaaaacagaatctggcaaggtgtagtagctcacacctgtattcctagcactttaggaggccaaggcaggaggatgactagagcccaggagttcgagaccagcctggggaatttagtgagaccctatctccacaaaaaatacaaaaattagttgagtgtggtggtacatgcctgtagtctcagctacttgggaggctgaggtgggatgatggcttgagcctaggagattgaggctgcagtgagctgtgtttgcaccactgtactctagcctgggcgacagagcaagaccctgtctccaaaaaaaaaaaaaaaaaaaaaagtccagagaagaatgtttgagatgatgaatatgctaattgtcctaatgtgatcgctatacagtatatgtatcaaaacatcactatgtgctttatgaatatgcacaattatgtcaagtaaaaaaagaggaaaaaaataaaataaaatagaaatttccactctaagatagtatcactggtgagttgtataaaataattaaagacaaaataataacatgtcaacaatctcttccagaaaacataaaagaacgctgaaacttcccaactcattacacagatgcaaaactcttcaataaaatactagcaagtggaattaatgaaatatcaatgcatataaaaaatacataactaatatttgaattttatccttggaatgtaagtttacagtaagattagaaacccaataaatgttaatatatccattgaagcagaaaaagtatttaatgaaacccaaatctatgtgataaaactctcagtaagctaagaaacagagactccttcaacctgataaagggcatctacaagaaaactacagtttatataatacttaatgcgtgaacaaggcaaagatattgaatcttaccactcctatttagcatcatactggaattcttagccaataaaataagtgggggaaataaaaaatagaaagaatatttagattggaaagaaaggcagacaacacgactatgtagaaaatctcaaagaatctaaaacaaaaacaaacataaaaacttcatagaaataagtgagtttttttaacaggattaatagttaacccttttatatgttaaagggttaacatataaggatgaatgtttataaaaaagaaacaaatgggaactgaaattaaaaagcaatactatttataatagctccaaaataaaataagatactgaggtatgaatctaacaaaaagctgatgatgaacaactcaaagatctaaataaatggagatatgtatcacctttatgaatcagaataatcaacatagtaaagttgtcagtgtacctcaaaatatctgtaaatgtgatgcaatttcaatcaaaatttgacagtattttttgaggacatagaaaaactaacctaaaacttaaatggaaagacaaagcaactagaaaattccaactcattttgaaaaaagaataaaattggacgaatcacaatatccattaaggcttactataaagctgcagtaatcaagaaactgtggtattgatgaaggtatagacacatgtattaatgaaacagaatacagtccagaagatcaacacacatatgaccaactgatttatgacaaaggtgcaaagacatttcaatgtggaaagaatagttttttacagcaaatagtgttggaataattggacatgtatatataaaaaaagtgaacattgacctaacccttaccttagaggagaactaacacaaaatacatcataggtcaaaatttagaatgaaaaattataaaacttttagagtactttgatatgacgctaaaagcataatccataaaagaagaaaagtgataactggattccaataaaatgaactacttctgctgaacaaaaagccctgttacaagaataaaaagacaagctgcagattgggagaaattgtgtgaaatcactaacaaagaaggaggattacctactagatatccagatttcacctactgctacagtgcgaggctcaaagatagacaaatggaccaattgaatagaaagaaatactagaaacagaatcacacatataagaatagctgatgtctactacacaaatagaaaagggtagagaacccaaaaataaaaccacatacctaaaaccacctgatctttgacatagttgacaataacaaacaatggggaaaggatatgctattcaataaacggtcagtgcagaagattaaaattggacgctttcctttcaccacatacaaaaaattaatgcaagatggattaaagacttaaatgtaagacccaaaccaataaaaaccctagaagaaaacctaggaaatactactccggatatcagccttgggaaagaatttataacaaagtccccaaaagcaattgcaacaaaaaacataattgacaaatgggacctaattaaactaaagagattctgcacagcaaaataaactatcaacagaataaacagacaacctacagaatgggagaaaatatttgcaaacaatgtatctaacaaaggtctaatattcagtatctataaggaacttaattcaaaaaacaaaaaacaaataaccccactaaaaaatgggcaaaggacatacacacctctcaaaggaagacacacatgcggccaagaaatctatgaaaaaatgcccatcaccactaaacatcagaaaaatacaaatcagaaccacagtgagataccatctcacccgtcaagatggctgtttttaaaaagtcaaaaaacagatgctggcaagattacagagaaaagagaacacttatatactcctggtggaaatgtaaattagttcggctactttgaaaatcaatttggagatttttcaaagaacttaaaacagaacttccatttgatccagaaaacccactacggggtatatacccaaagaaaataaatcattctaccaaaaagacacatggattcatatgttcatcgcagaactaattcacaatagcaaagacatggaatcaaccaagacgtccatcaacagtggactggataaagaaaatgtggtacacacacactggagacatacatgcagccaacaatcatatggaaaaaggtcaacatcactgatcattatagaaatgcaaatcaaagccacaataagatactatctcacatcaatcataatggctattactaaaaagtcaaaaagtcagatgctggtgaggttgtagagaaaaaggaatgcttatacactgttggtgggagtataaattagctcaaccattgtggaagacagtgtggtgatttctcaaaggcctaaaagcagaaataccattcaacccagcaatcccattaatgggtatttacccaaaggaatataaattgttcaatcataaagaagcatgcgtgatgttcactgcagcaatattcacaatagcaaagacatggaatcaacctaaatgtccatcaatgacagactggatgaagaaaatgcggtacatatataccatggaatacaatgcagccacaagaaagaatgaaatcacgtcctttgcagggacatggatggagctggaggccattatccttagcaaactaacacgggaacagaaaaccaaacactgcatgttcttacttataagtgggagctaaatgatgagaaaacatggacacacagagggaaacaacacacagtggggcctattggagagtgaagggtgggaggagggaaaggatcaggaaaaataactaatgggtactaggcttaatacttgggtgacaaaataatctgtacaacaaacccccatgacacaagtctacctatataactgtgacagaaaaatatattgggccccccaaatcactaagcttaaagaaaaactcaagctggaaactgtttagggcaaacctgtctcccattctattcagctacccctgtgctcactgaggtaaatgcatatctgatgcctcctttggaaaggctaatcagaaatttgaaagaatgcaactgtttgtctctcacctatctgacctggaagccccctccctgctttgggtcttcctgcctttgtctcaagttatcctgactttccagactaaaccaatgtacttcttacatatattgattgatgtctcatgtctccctaaaatgtataaaaccaagctgtgccccgactgccttgggcacatgtcaagacttcctgatgcagtgtaatgggtgcacatcctcaactctggcaaaataaactttctaaattaactgagacctgactcaaattttgggggttcatataacaaacctgcaaatgtacccctaaacctaaaataaaaggtaattttcaaaaaaaggaaatgtagcacataagcaccatggaataccatgcagccataaaaaaaattatgtcctttgcagtaatgtgcatttagctggaggccattatcctaagtgatgtaacacaggaacagaaaaccaaatattacatattctcacttataagtgggagctaaacactgaatacatatggacacaaagatgggaacaatagacaccgggactgcttgatgagcgcaagtcagagggaagtgtgggttggaagattatcaggtactatgctcaatacctgggtgacaggatcatttgtacactaaggcttaatgacatgcaatttacccatgtaacatatctgctcacatatacccagaatctaaaatagaagtagaagaaacaaaaaaagaatatataatgtatactgaaggtagcatggcaaaagggcaaggatggtcatttcagtaaaacatgctgaaacaactggatagccatatattttttaaatgtcctctaaaacaaatcatctaaaaattagttttaggtgagatcaaaatgaggaagacaaaacattaatgcttgtagagtataacataggcatacatctacaaggccttaagataaagaagataaagaaacactccttatataatacacaaaaaatactaacaataaaagaaaaacaagaaatttcattagtaagatataaaacagtaagttatagcctgggagaagacacaacacacataccaaatagaggcctaataacaatcatagtataacgctcttttataaatccacaagaaggcaacagttttaaaagatgctcaaaataatacttcacaaaagatttccaaaatggaaaagttgttcaacatcattaatgaagaaaaatcaaattaaaactactctgaatactactacacaatcaccagaatggctaaaattaaaaagacaatttccaaatgttaatgtagacatggagtcatgtgaatggtcataaacacctggtgggttttaaatctttacaagtactttaaaaaactcttggatagttgaaatatatacaggcatatctcgaagatattgtaggttcagttccagaccaccacaataaagcaaatattacaataaagtgagtcacacaatttttttggtttcccaatacataccgaagttatctttacactatactgcagtctattaagtgtgcaaaaccattgtgtctaaaacactacaaggtacatacctaaatttaaaaatactaaattgctaaaaaatgctaagaaccatgtgagccttcagcaaattgtaatctttttgctagtggagggtcttaccttaatgttggtggctgctgactgatcagaatggtagttattgtaggtggctttggcaattttttaaaaataagacaacaatgaagttttactgcattgattgactccttattcagaaaagattgctccatagcatacaatgccacttattagcgttttacccaaagtagagattcttttaaaattggggtcaatcctctcaaagcccgctgctgctttgtcaactaaatttatatactgttttaaattttacaaaaagtacatttttttttaaacagttagggtctcactgtgtcatccaggctggagtgcagtggtgcaataatggctcactgctgccttgaatttccaggctcaagggatcctcccacctcagcttcctgagtagctgggactatggatgtgtgccaccacacttggctagttattttatttattttttttatttttgagacggagtctcgctctgtcaccaaggctgaagtgcaatgacgtgatctcggctcactgcaacctccacctcccaggttcaagggatttgcctgcctcagcctcccaagtagctgggattacaggcatgcacccccatgcctagctaatttctgtatttttagtggagacagtgtttctccacgttggccagactggtctcaaactcctgacctcatgtgatctgcctgcctcagcctcccaaagcgcttgggattacaggcatgagccatcatgcccagcttatttttatttttaaatggggtctcactttgttgcccaggctgatctcgaactcctagcctcaagccatcctcccacctcagcctcccaagttgttgagattataggaatgagctaccacacttggctaccaggagtagatcccatttcaagaaactactttgtttgcttatctgtaagaagcacctcctcatctgttcagcttatatcatgagattgctgcaattcggcacaccttcaggcaccacttctaattctagttctcttgatatttctaccacatctgcagttacttcctccaacgaaatctttaacccatcgaagtcatccataaaagttggttggaatcaacttgttccaaactcctgttaatgttgatattttgacctcctcctacgaatcatgaatgtttttgatggcacctaaaatgatgaatcctttccagaaggttttcaatttactttacccagacccatcaaaggaatcactatatattgcatccatagccttacaaaaatgtgtttcttaaataatacaacttaaaactcaaattaatttttatccatggactacagaatggatgttgtgttagcaggcatgaaaacaacattcctctccttgtccatgtccatgaccaggagtactgtcaattaacagtaatattttaaaaggaatcttcttttctgtgtagtaggtctcaacaacggacttagaatattcagtaaaccctgctataaacaaatgtgctgttatccagactttgttgttccatttatagtgtacagtcagagtatatttagcataattcttaagggtcctaggattttcagaaggataaataagcactggcttcaacttaaagtcaccagttgcattagcccctaataagagagtaaaactctcctttgaatctttgaagctagaaattgatttcccctttctagatgcaaaagtcctagatggcatcttcttttaatagaagtctgttttgtctagattgaaaacttttgtttagtgtagccacttttattaatgatcttagctagatcttctggataacttactgcagcttctacatcagcacttgctgctttatcttgcacttttatgttatgggaacagcttatttccttaaatctcatgaatcattctctgctagcttcaaaatttttgcagcttccttacttctgtcaaccttcgtagaactgaatagagtttgggccttctctggattaggctttggcttatgggaatgttgtggctggtttcatcttctatctagaccactcacacttcctatcaaagatcattaatctcacattaccataatagatgtagtactaatgaaaaagtttgaaatattttgagaattaccaaactatgacacaaacacaaagtgagcatatcctgttggaaaaagtgttgcagacttgcttaacacagggttgccacaaaccttcagttcgtaaaacactcaatagctgcaaagcacaataatgcaaagagcaataaaacgaggtatgcctatatgccttaagaacaattgtactcctagtacaattgaagagactgaatacatttcacaccaaaagacatgttcataatacctttaatcataatagctcaaaactggaaagccaaatgttcatcaaaaatagaacagattaagtatagtgcagaatacgaaataaaaaaattaaaccacggctatactcaacgctgataaatctcaaaaaatgtaataatatcaaatcaaagaattcatatggtttgaactcacctgtaacaattcaaaaagtaagcgaaactaaattattgtgtttaaagaaaacacttaggaaaatggcatgattagcataatggttagcttgagctgggatgggagagttaattgaaaaatgccttttgctacactggcaatattctatttcttggcctaggtggttttacattggcatttattttgtgaaaaatcattaggctctatatttttattttgggtaattttctatgtgtaatattttacatgttaaaaaaaggttaaaaaagacaattatttaagtcagagaaccctcatttatcaataatggtagccagacacaaaaactttcaaattcataaatcagatatattgatggggtgaagcttcaatggcatttataaatagtaaatttaaataatgcacatctctcatgtcattaaaatataatttaatataaaaaaactaatttacatagatgtaaagactatattaagtcagtattatatattttttcctaaaaagaaaaataatataggtattctatagactaattataagtactatttcctttacatgccaactaagtggagtagagagaaaaatgtgtacagttgtcccaaagagaagtttccaggactcaaagcaaagataaaaaagaacctggttggttatgtggatctacaaagtagaatggttcagtaggccagcatgtcccacagcgtagaagacgcaacaaagaagagagcaacaggtacagaattagaatgtttgctttttcagagcaaatgcatttcaattatgtttcagccttctgctgaacaccataacgagcttttcaggtagtaaatatttgttaaattaagtattagataaagaatcctaaaatataatcattgaaaacttcatcacattttgccttcttacttaaaaaagtcattaaaattttttaaattcaaaaattagtccaggatactatacctgaataagtgatgctgctttattttgaactttttccagcttttccttttttaacattaataattttctctgtgctaagactcttcgccaatatttctgaatgacgagtgctgcattaactctttttctcaatctttgttttgctagaaaattgattacagccaattgaataattcttgcagctttctctctctcctaaaataaaaaagtcagcaaatgtaaattaaacactcacttaagaccttaaattattctttgtaagataaccatatgttaaacaccaatcaaattgatactggaaataaaacacccctacacttcttgtgttcatctttggaatactgataattccaggcatgtcgaaagcgctgataggtgggcttgcagatattttgtatgatgaaacaaagattcctaagaaatagtctaagataaagattagacatgtttgatctatcacagatcctcagtaatcaagataaaggccatttgaagtgtaatgtggtatgtttctcagattcaggtccactgaattcatgattaacttttaggaaaggggaggattgtatgaaaaaaagaatgtgttagagaattgtaacaatttgaacaaagcaaaacactaaaggggagaaacaaaatacctcctcctttagcacagaatacattgtggccttaggtcatacaagctgaagaggaaaaagtatagtttgggctatgagaagtggtatctgagatgcccaacatttgtggtcaaagaggacccagctccctagttatgttagaaggcaataccccccatatctctacttgttacttctgataataaattgctgtaaataataacatattctatgtccagcaccattctgaacacttcatgaacaatccatttaaatctcacaaccaccaccataagaacaaatgagcaaatactactcttacgatcactagaaaactgaggcaatgaggtcaattagcttgttagtttattggtaatatagccaggatacgaatcaggcagtttggctttaaagtaactttgctatactgtccaatactagatttctcaatttacttcactggaattggagactagaaaatgaactatttcctctggtgggaaggaataacttatggcagggatgtctggcagctttttgtgttgctgtctgggaccgtccaccatgcaagggtaggctctacacagagattagctataattccaattattaattaataacaatcagtggttggtatctgtgcatgaaaattgtgcaataggggaaacaactatggaaataatcaaactgttatttttacatataaaaaaggtgaccaatagattgaaacataaatactaaggaatggtaagtgctatatattggatcattcctctggggagaaagagtagacaattccaaaatcgggctaggggaattatgtatataacaagttgattaagtcatctaacaccattatcaatgcccttgtgaaacctatgggctttaggactgtagaggctcaagttaaaagcacaaccctgttacagtaaataaataaatacacaaataaaattttcaaatgttgcagttcagaagtatattgcatttgagacaaaagttgtaagggtcagggcattcatggacaaaataggctaaagtaaattgtaacttatctcagtttttagatcatctctatagaactaaaatacaactttacatgccattagagaatttaaagatggaaagtaaataaattagaagaggcaaatatattaccaaatttagcaagtatttgaaaattacatatactgatgataaaagtttccatgtatggtcattgaccctttttaatcagactgttgttgagtcagccaggtaccagcttatttcttttatcttgcctcatatatatagggccaaattctaggacttcttttgctttggagtttatggctatttgttgacaggaagaactgagagctgtaatgtaccaggggatgcttcaatagttcatcaggtaattttagctacttgacaaagtttctttgtcataataaaagtttgagccactccattaatagatttatatgaattataacataaaagcaaaatataaaacctgaaaaatagctatctcaagttaatatgtttagtagcttgcaataacatagggagcctgctgcttaatgttctaaatagaaaacggaaagatataattggatgtgaggtaattgtataaaagagggagtatggtcaccaagaaaaaggagagaaacagtggtctgactgggtccaagaagtttaaccataagtatagaaacttctcttaattcttcaaaaaaacttctcttaatccttcaaaaaaatggaaacttctatttgcattaaggaaataaatcaagaaaagggatctcactagcaaaaagctgagaaaattctacagttaatatcagactaaggctgggtgcagtggctcatgcatataatcccagcactgtgggagacagagtcaggcagatcacttgaggcaggagtttaagaccagcctaggcaatggggtgaaatcctgtctctacaaaaaatacaaaaattagctgggtgtggtggcatgcacctataatcccaactactcaggaggctgaggcacaagaatggcttgaacccaagagacaaaatctgaagtgagccaagatcgtgctattgcactcctgcctgggtgacagagtgagaccttgtctccaaaagaaaaaaaaaatctgattaatacaaggctatcttgagcagaaaataaaagcagaatacatatatatctatctcttgtaattctaaaactctcatttaatgcaatatacaatgggtgaatcaaatagcttgaggactggccaggggagacacttttctgaactcttccaattcccctagaagtattggaagcttctaggggaattgctttaggaaagttttcaggaagttattctccaagtgatatgtaggcagggaggcagatcctgagtttaggggcactatagggcacacagcatatacagtagcagaaaagaccatttgtgagtgttaagaccctgcctatttcccaaactttactatgaagagtttgagtaggggaaaagaaaattatttcaattagtcttatttccaagtctggtgtgaaatgaaaaaacacatattgtgtttgaaagttgtcaaaatttatctgttttacacagctaccaagaactttatcacagatgcattatatttcaaagttgagaaggaatattgggtggaatgtatttctgaaatatttatgataaattttaccaggcatggatgcttgttttattttattttttttggttttccaaataaataaacacaatattagttagtagatggaatagggtgacaaaaagagtgaaatagtttgttcaacttgatcaaggaggccgtttcttagattattaaaaataacaattttctcagaacttaagaaaaaaattttttacattaatgaaatttttgtactattggggtcacaaagggaaacaataaataacatctctattctcatgcccagatcctaacattttgaaaaattaatagcagaaaccaaaataccacttttaaaactaataaaggataaagtagaagacagcttcatggcaaacaaactaagcttactagttaaatcacaaaatcagacacttgatgctcaggcccaggcagcactagttgaggtcaagcctcatacagcacagaataaaaaattaatggaaagctcctgctctccagaggcaggttagattccaacaggaggaaaggaagagctgagtcaatgtgagctatgtattcctcacaaatttaaaaagcagattaagttattcctcttcccctggaacagactaggtgaaggggtggacagactggaagatacatcaaatgaagggaatattagcaattagggagaaatactcatacctccccaacccaaaatacatatacacaattactaaatttatcttaataatgccatacatccataaaatgtaaaatcatatcaaaaatcaatcaacaaataccttctaaagtataattcacactatagtagtttcatattctaggagtacctgatggcgtttgagatctgtttttagtttatattttctccatgttgtttgtatgagtcgagcagctcttatttctttacgaagatccaaaagccttgcacaaagaaatgacaaataggtaataaccacctaaaaaaaacccacaaaagataaaaacagaatatcaacagagaatacagtacttactatcatcttctgagactttattattgaattaataattagaaactcttcttttacttaccttttcatctggaattgtatttgacatatctgaatgattaatcatagcaggtattccaccaaggtctctaactgcagacctaaccaagtgaaaatttttcttttcattttctaggagctctttgtatagctctgaagtattttctattatgcaggaggaaaggagaaattagccgtagcttcaaatcagacatggcaaaaaattggaaaagtaaccaaaagggactaaccatgatcaaatgctttaagagacatatccagagaactgtcatcagattcagatgatgaatttaataccactgaaccagtttgcgtacattccacagtttgagtagtacgctgacatatagcgtcaaatggcacatagcaaggatggtaatggtggatcaggtaacataacacacggccgtctgagaaagacactgtaaaattctccacctgattgaaaatgccagaaaaacaattaaccgcatttagaaagtagtatagacataatggtttgcagaatacctgtgaataataaaggcagagactggagtgacaaatctacaaggcaagtaatggcaagtttgactggtaaactctaaaatttaaaagaaaaaaataaaagagtatcccctagaactttatgtgagagcatggcacatccaacaccttgatttcagacttctaacctctggaactgtgagagaataaatttctactttaagccacctagtttgctgtaatttgctatggtagtcttaggaaactacaacaacaagcaatgagagtggattctcgttatttgtgaatattgaaccattgcatagaggagaaatataaggttagtgtcctgtgagcctctggttataatatgtttatcaaccaatccgcacataaccttgttcacaggtgtttctgattcaataacactaactcatggccaacagcattataattcacgcctgcattaaaattagttaacgcatatattttctgtatacggcacatcacagtcttctcctaagaacactagacagggcttcattactacacttgaaagccattttaaacagggaactcaccaacaaaaagcacaaaaatgcaaaaaagtacaatgctaaataggtcctgaaaaggacgcttgtttacagtataagagctgaaacaaaaagagcaccaccttgtttgacatcagctggctatgagggcccaggcattcacacacgtcaataaatgaccacaaaatactgcaactactaattttggcattaaaaagaaattttagctagtatgcaaattccaaatatggaattaattaataccgatgatcaactttggctctctagtatttagttaaaacatagaagattatccatatgtttaacaatttttgtactaataacttcttggtataatcatattgcaaggcttaccatatttagctatacatactgtgtatcactgtttctgtcttatatttattaccagatagtttatccacgtgtttaggggaaatttttttcatatatttacactaagaagtatacttcatacagaaatacagtgttaacctaacaaatgattatagagagactcaaattttgttcttcttcctctaactagtggtaagttcttagttgtccctttctgaatgtgggcttatttgaattgaactttataataatgatatgattcttttatgtcccagttctatgcaagcatcttctactaagacttccatctagggcatatttttcttttcttgataaaattatcatgtatcacacaattggtgatagattagatgaaatacagtgtatgataaaacattcactcatttgagggaaagtttgcttacacagatgaactaagaaattcaagaaaagacttcaggcattaagtttaagtgactttcatcaaaatttattaaaatatattgggttaaaacaaaaaacaaagaaacttacctttttattatagaaggcacaaacagcatttacccaatccatcaataactttatgttttcactatattgttcaaaggaaccactatcccttttgccttttttcttattaataagatcatcagaatggcatgatagtagagatattgttttctttatactctttgtgtgttttagaaaggcaatttcttcctttaattgatctaagttaagggaaatatccacctaaaacaaacacaaaaaaagataaataccttcatattttccatagattatttttaacccacagaaatcaaagtaactgtcttctatttagagaaactgtagatgttttaaaccaggaagttaaaaaaatcaaagaaaataaagtgcctgaaatggatattttagtacaaaacagtcgctttttttttccccaaaggcaaacaccatctacactgaagtgataaaatgtttagtggttaagaacatgggatttggggcccatgggatttatcaatgatgtaaactgtagtttcagtttcctcatctgagaggtagacataacacctactttgcaggtgtggtgaagattagattgaaatatatatatatatacacatatatatacatatatatatatagcatttatcacagttactggggcaaaataaaccttattaaatgatggttgttgttgttattctttattagattcaaattgtttttataaatcagtaatcaaaattgataaaaaatacaagatgtaccaaatgtataatacctgaaaagcaaacgctattttccaaagcaacctgagagttttttctctgtgcctatccacaatatccttagatagaattgtatttcctataaaagaaaaggttgtccattagcataatgtacgcacatatcaatattcagtgaggagaataagttttacctctactcagtttttaccatgctcatcacttaattcaattcctcgtgatttaagaacttgaagaacaatgtcaacattgtgcatcttttgaagacgacttattgccggaatcctgagtttctttgagaggtcccagttctgtgtgagaagttccatggttcgcctggcagtaataaaatgttcagatgaaattatcataaaaacgtatatgaaaaaacccttcactgaaatatagttatttcccacataaatcccaacagttacagggctttatgatcagaaagacttcaaaaaactatctcaaaactctgttgctccatagtcggcaagtagagttcttattttaagtttgggattgaagtgtgtgaacagatgataagaaaataagatatacatatataaatgcacacatcaacaaaataatagggctctacagaaaagagaaagaaaggaaaggacagaaaagagaggagagggatgtagagcagagaggaagcacatttattgggatgtactatattgtacacatcaagcaagtgctttattttcttattttagttatcatggtaaagcgcacaattaattattgttagataaagaaactaaggcccatagagcttaaatgaattgcctatggtcatagagctggtaatggcaaaactaagatgagaactaaaatccagttttacttgtttccacagtaattcctatatatatataaaaatatatgtatatatacacgcacgaatatttgagtatctacctaacaaagacagaaaaagcaaaccccaactgatttctgtcttcaacaaaaagctggtagaattacttatacaaccatagtctctaaaggctagaaagagacttaagataattctaggccaaccatccagtcaattgtagaccaacccatcacccatggcattaatagagtaaccatcccaaagcattctcaagtgacttcaaagatttataaaacagtcattttgctgacacttatcaaaacagaaatttggttatacaagattgatctcttaactacttagaattcctaaccgactaaataacatcaacatccaacagtgctaaatcctcagtaactcctgtaaaagcataaaaatgggctttctggccagccgcggtggctcacgcctgtaatcccaacattttgggaggctgaggtgggtggatcacctgaggtcaggagttcaagaccagcctgaccaacatggtgaaaccccgtctccactgaaaatacaaaaattaaataggcatggtggtgcacacctatagtcccagctactcatggagctgaggcaggagaatcgctagaacacagaggcagaggctgcagtgagccgagatcgtgccactgcacgccagcctgggtgacagagtgagactctgtctcaaaaaaaaaaaaaaaaaaaaaaaaaaaagggagggggactttctttgtggaaaaatagcactgaacattaaaccaatccttgttcctcctagaaagtggaaaaagtataaaaacaattcctattggccagaatattgatgtggtagcttgaatttattaaataaacaaattaaccaactaaaaaaatgtgaaatattttaagcaaaatgatcttagctcatatggaactgctaaagtgagacaaagctgcagtaaaaagactattaacttgtgagaatactgatcagaaagaaaagaatgttcatggaaatttagcctaaaagaaggcaagggacatgtaaactgtttttcaaaaaccggagattcataaaaatctaggatcttgtcctcataaatgtcaaagaattcctccattctggccaagcggtcctctgacctctgcttgaaccttccaacactgtgaactggttgtttgataaagacacgtctgaatattggcaagtttttaaaccaaacccacattcatcttcctgaaattttcattgttcatgcatacttattttgcttggcaataaacaatttaatcaccttttattataagacagttcttcaaatatcttaaaacatttatgccccagagttttctcttctgttctatttctctaaatattcacagttctttcaattggtctccatgaaacatggatataaggttttctagtttatactctaaagttatctctagtcgaaacaaagaaattaaaaagtatatccaaatagcttctttcctattcagttgagttttagacaacatgaattttaacatgaagactgcctgcaattaattttagctacaatacaagcaatttaaaatctgacaaaaatgtaccagggtcagctaaagagtttgttaagttttactgtagcagagatattttataaagaccattaaatctgtgctccccatacgtcaacatttaactagctgttttgaggcatagcaacttcctaaatacacagagaaaaaaactttcattgctttaaagaaatctcttgccttgaccccaaaagtgcttccttgataaggatataatatatattttggagagttccctagaaataaaatgagtatctccaacccagataccctgaagaggccaatcatggcaaaatgctaaaggccattccttctaagcaaaactggctatccatcatacataccaaagccaattttgagcattccagtttgttattgaggaaatattgtgtaatttgaagtcagatttcatgagtttatgtctcaattccactgtggaaaacttgggcaatctattctaccacttcatcttattttcctcatatgtaaaacaaggttaatactactaaaaatggtctcaaatgatataaaattcatgaaaccactgtcaataaaaagtgtcattttggccaggcacggtggctcatgcctgtaatcccagaactttgggaggccgaggcaggcggatcacgaggtcagaagatcgagaccatcctggctaacacggtgaaaccccgtctctactaaaaatacaaaaaattagctgggcgtggtggtgggcacctgcagtcccagctactccggaggctgaggcaggagaatggcgtgaacccaggaggtaggcttgcagtgagccgagaccttgccagtgccctccagactgggcaacagagcaagactccgtctcaaaaaaaaaaaaaagtgttatttcaatgtttgatattttaattagtttaatggtcttcccaactcctattctgagacatcagtaattattatccatgagtcccagtcacatgccatcaggaaaaaaggtgtggataggagacaaggtttctggacataacattgatgtaccacttccctgaaaaaaaaaaaaaaacctcaatttttttcagtactaaatttattgtactacttgaaagagcaagattgaataattacaaaaaaagtgttttccagaaaatgttagtctattccattaagcaaaataattctatttcttatacgtacacaaggcgcactccacattgcaagtctacggcaagatttgtaacggcaaaatcaaattcatcaaatggtgtctgaacatggttaacaggtaatcccaataagccaaggtgacgggaaaggtcaccttcaccacttaggaaatctcgtgaaaaagccaaaaggatttctttactagcctataaagaaataagttccagatattatattccaatattataattttgcttataataaaaacaaatcctccaaatcattctgtacatataaaaataaaataatataaaaagtttcatattatacattaataatgcaaacttcatacatatttccaacttaagatctttctaaaagttgctcataataatacactataaaaactagcattaacttgattatatactacatcaaaattagggaagaaattttctcaaaaattaaatcttcagaagcatagtttaatccattttcaagtcaaaattaagagtaatgataatgtgctgatgaaaggtaaaccaataaaaacgagggatggttagaattactgatgggactcaccagacaggcattcctattttactcctctgagtattattctttggaaaactaattttttttctaaagagaaaacataccatgaaagcaagcaaaagtcgtaaatgggaaatataaaatataaagcatacaatgaaaagcataccttgaattcggcatctttacagaagagacaaggatcatgatcaatgagtctggaaattttagcataatcaagaaaacagaccaacaacaataactttttcaatgtaaacttggacaaagcttcttcatgaccttaaataaagtacaaaaaagcacagcaagttaatctatgaaaggtaggtttcatcttaaaatatgataataataataataaggtgttagtaaaacaaaaagtgtagggtagcaagcacaaataaaacactatgtgccttttttagtgctttatgtgtataaatccatttaatcctcccaatatctctatgggacaagtatgcaccacttaatattttcaattcatagatgaggaaacaggcacagaggcatcaagagatttagttggtcttactcaacaaatatttaatgaacacctactacatgcaggcaccatcgtaggtgttagatatacagtaccaaattacaacaaacatgacccccataggacttacaacctactggggggagaggatgggtagagacaacagatagaattataaatagtgatggaggaattaacggggaatgagggtggaggaagggagagtactagaagcagagacttatttagattggtttctttgagaaaggaaaatgtaaacagaaacaggaagaatgacaataagccattcatgtataatgtggagagaatgtaggagaggcagagatacttaccatctctatacaggtgaggaacagtggggtgtctatactcagctgctatatcaggattccaaagtaggcgattcagaataaacatagccaaccctgtgacatcactgttatcttccaaagatatgagttctccataagttgtctgaaaataaattaaagccaaagtcagaattatgctatctctaagaaacaaagggaagtgactgaggaatggcagaccataacctaaggaactggcaatgttctactttctaaatgacatggttatttgctaaataacttctttaaactatgcatatatgatttatgtatatcttattgtatatagtatacgttgcaatgcaaaaagacaaagctcaggactaagataagtcttaatcatctgacgagcaacattcccattttaattttttcatttaagttaaagaactatcaaatataggcatgttgttcaaatttatttataactgtcccattaagtacatcgtgaagttataacagaaacctaaatattcaaatttttatgatagttatcaatgtagaaaacatctgcaaatcatccaagataatttggaaagcacaggtctgtttataatcaatgatttaaatataaaattagtttaacattagcatgcttattaataatttttaaagcaattaggaaaaacttaaaaaatatcaaattctgcaaccctacattgacaaaatataaagattaaagcatggaaaagtattaattattacctaccaaaatagaggaatttaactttatttactttttttggcctttgaaattttcttaaaatcctcacgtacatttatttaaagaatcctagggtgtagtaataaggtacctgtaaaaagattatacatccccaccacctgccataaatttgctgtgacttgtgggaggttaatacattcctaactagtttgtgcttagctacataatgtgctttggccaatggaatgtgggtggagatgatacaaattacatccaagaggttttaaaaagcattgcaaggttccacacaaagttcttgattttatttttgccacaaaaaagctatgtcccaaatatggggggctctatttcaattgaggttccagaattctttcatatgtgaagcagagctagttgatctgtaacttgccaactatttaaagggaaaggacactggaattgaaataagaaatcccagcaatgacaccacaatgctgtgtaaccacagtaagcttattatttattctctctgggcctcaatttattggtatataaaagccagattattacaaagatcctgttcggtcccaaagactcttctattccaaaacctggaataaactgaaatagtaatgggagaccctacattaagaaggtaagaaacctagaaaaaatgtgaaagcatactagcaaaaaactaaagaatacagacgcacaaaagatacttttaataaaaatgtctttaaacagccaattactaatagtatctttctaattcagtcagtttcaacattctaggtattacagagccaagaactatgtaaagaatgcaaatcctgatgacatttttatgagtactatttaatcagattggtataggttcaactcctgaccaaataattggcatagggcaagtcactttttttttttttgagaaggagtctcgctctgtcacccaggcccaggctggagtgcagtcgtgcgatctcggctaactgcaagctccacctcccgggttcccctcattctcctgcctcagcctcccaagtagctgggactacacgcgcccaccatcacgcctggctgatttttttgtatttttagtagagatagggtttcaccatgttagccaggatggtctccatctcctgacctcacgatcagctcacctcagtctcccaaagtgctcggattacagcatgagccaccacacctggccagggcaagtcactttaacatctaagcttctgtttcgttagtgaagtggaaataataatacatacttcactgggttttaagaaatttaaattagaaaatgtattcacagcagcctcgttttggcatttgtaaatttgcaaaaatgagtttactatagttgtcattacgtgcaacaccaaattatgtttaaagagactgtacagtaaaatgttgtattacaatatggtgtaataatatataatggcatagtctatttacctaataagcatttattaacgggtattacattttatactaaaagatgaatcaagctaacctaatgactttcaacttttataagtaaaactacattgtaataaaatgagtctattctacaaaaagtatataataaaaaaatattattttagaaacctgaaatatatgcttacctctagaccaattcgaagccacaaaggattgtaggacaacagccaattcaggactttctgacgttctcctgaaatgcatgtcaaaggcaaataagttcaaattgataatcaaatagagacaagaaataaaacttcaaggagagtatatcagtgggaaaaaaatacttgcttatatgaaataagttaatttaaataaaatacacttatagtcttaaatatacatgatcatattcaagtatgtgggatttttggcagcaaagctaaagcatgtatacctagttttgaaatacaaaatctcttggggacatcagtatctggaagagatacctgcattcttatgttcattgcagcattatccacaatatccaagatatggaatcaatctaagtgtccattagtgaataagtggataaagaaaatgtggggtatgtgtatgtgtgtgtacgtatatatacaaataaatatatatgataaatatatatatatttatatataatgaagtactattcagtcttaaaaatgaaaatcctgtcacttgtgataacatggatcaatctggaggatattatgcaaactgaaatagcctaagcatagaaaaacaaatactgtatgatctcatttatatgtgaaatctaaacaagttgaatttatagaagcacagagaatggtggttgccagagaatggggtagagggactggggcgatgttgtcaaaggagtataaagtctcagttacgcaggatgaataaattctggagatcgaatgtacaccatgacgactatagttaataacagtgacttgtatacttgaaatttgctgagagtacttcttaaatgttttcaccacacatacacacaagaaggtaactatgtgagtagatacattaattagcttgattgttataatcatttaataatatatacatatatcaacatcatgttgtataccttaaatatatgccagttttacctgtcaattatatgtcaataaagccgggggaaaaaaacacaaaatctcttgaatgtttttaaagaattaatgtcaagatttctgcagtcttcttacccacatctttccataggtgtctatcttttcgaacaattaaccgcctagcttcaatttcaatttcaagctttttaatagctttaaccattttttcagaagtaaacaaacggcatgctgcacgacgtagtctgtttaacctacaccgagcagtataagctctgagagacatttcctcttttgtaggtgctctaggaacacttattttatgttgattctctattcccaaaagaagagtagcagcatttactgggtaaaaacaaaagaaagaatgtttctggttaaacaatatctctacatattcttaaatccagcaataaaatgcaatttcagacggtaaaaacataatctattcctcacccactccaagcttactccttaggccaatctatcatcgcaacctgttagctctacctgcaaaatgtattccaagtctagccacttttcaccgcctctactatcacaaattcaaacatgattatctctaatccggactaatgaattaacttcctcactggtttatctgttcccatcctttttataaattaataaaagtcaagtttctaaggaatataatttttaaaaaccaattgaattttgaaatgtaatttaatcttttataaaacacattttcttttaagaaaagaacgaaaaatggggctttgctcccttttggaaaagaaacaacttttttctttttttttaagtgatctctaagatcactgcttagagagcatctaattcaaagacccttttaatacaaaaatccagccaggtacaattgctcacacctgtaatcccagccttttgggaggccaaggcaagtgaattcctcgagcctaggagttcaagaccaactctggcaacatagcaagaactcttctattcaaaaataaaaaataataaaaaaaaaaaactagccaggcatggtggcgtgcactggtagtcacaactactcaggagtttgagggagcaagattgcttgagcctgggaagtggaggctgcagtgacctgtgatcacaccaatgcactccagactgggtgagggagtgagaccttgtctccaacagcaaaaaagaaaaaaaatcctatacacgcgcttctctgacaaaaataaatcagtgtctgtctgaacaccagaataggaaaatcatcactttaaaagttagcctatatgatgatttgacaatttaaacattcataagaatttttccttatcttcagctgaaattgatccctataatttctaagcaagagctgcacaaaagttaagtttccttctctttcacaagaaaacacttcaaatgtttgaaaggcacatctctacctggtccctttcccaagttttctcttttccagaacaaacactgaaatgtttaaaaattcctcatatgaattggtgtttagtttcctcataatcctatagctttccaacatacttcttaaactaaggtattgaacagtggggacaatatgcccaaagtgggcaggccacacgggactgattgcattgactgatgagagagaatagagaacaaaaagtatatttcagtactttcggtaaagaaaatgtacatatataaatttatgtaaataaaaattcttacctatacaagcatttaggctaatgaacagggaattatgccattaattataataactatgtataattaaagaatgacaaacgatgttaaaaatctttatctgttaaaagtattattaaatttaaacattaatttaacgtttaccttcagaaatatttgtttttacagtgaagtcatcaggggttaatataaaatttaaccaccaagtgaagccctgttcctgcttttccttccagcgttcatcataaaacatgttttttgcagcaaatggcatcgggtgtctgggaatatctaagaatacaattaggttactgcataacaaaatttcctttaacttattgtacaatatacagcaaaagtcatttttactagcaataccatctttaaaacactgaacaatatttgcttttctactacttgcaggaaagagctgaaagcattttgggtaagaaatgtaatcagagcaaaatggggaaaagtaaagcgatatttcctggttatttaacactaaaccaccatgaatcaactacattaaagtctgatagaatatcttttttataattgatgcataatagatgtacacaattttgtggtacatgtgataatatattcatagaatttatacaaatcaggtcagggtacttgggatatccatcaccttaaatatctgtctttttttttttttttttttttttgcctttttggtagaatgatttattttcttttgggtctttaccaagtaatgagattgctgggtaaatggtagtcctgggcagattgcttgaggccaggggtttgtaaccagcctgggcaacatggcaaaaccccgtctctaccaaaaacacaaataaactagctgggcatggtggcacatgcctgtagccccagctacctgggaggccgagacgggagaatcacccaaacccaagagatggaggtctcagtgagctgagatcacaccactgcactccagcctgggcaacagaacaggactctgtcccaaaaaacaaaacaaaaagacaatgtgagaatcttgaaagctcagagagaagagcaactctcacagacaagggatctggataacattagcagctgatttctcagcagaaaacttgaaggccagtaggcagtggattatgtatttaaaataatgaagaaacctgtcaattgagaaactgatagctggaaaacctgtccttcaaaaataagggagaaattaagacatttctagattttttttaaagctgaaaaaatccatttatctctaaatttgccatacaagaagcattaaagtccttcaggttgaaataaatgaactctaggcagtaactatataagtaaataaccaagctatatgaatatataaagctctctggtaaaggtaaatatataaacaagcataaaaacagtattattgtaattttggtttgtaactccgctttttattttctacatgatttaaaaggcaaatgcataaaatgtaattataaatatgttaggtggtgtacaatgaataaagatataatctgtgacatcaataacctaaaaagagtagagctatatagcagtagaattttggtatgtgattgaagttaagttgaaataaattcaaattagaatgttataactctaggatgttatatgtaattttcatagtaaacaaaaacaaaatatacatagaatatacacaaaaggaaatgagaatagaaacaaaacttgtcactacaaaaaaaatcaactaaagataaaagaagttaacaactgagaaaatgactggcaaaaatcagtaactctgacttattaaaactctccatgctacataaatctggaaactctatttcacataaaactggagctgaaagagacaaatatttacttataaaattaaaagttatatgggaaacaaacactaattttttttagaaaaaatatgaacagagtaaaaatatgccttatagttatcatataatatcatgttttatagctctgggaaaatagaaaataaaatgttctgttagcatgaatccttctgtgccctaaaaaaaccctatggatcatactattattacctaaaaagtctattctcaaatgcagcagagtgataatttttataaggtagatattatttttagatatggaataatattggtgatttcaattttaataacattggattaagatgaaagaatgagaagataaaggtccctcagcaatataactcacaaacatgttcagaagcagtaagaagtcacattaattattttttgaaagtcaataatctacatttttaatttatgcatatagcatagctaatgtactattgctgggtccatttattcaaggaataattgccgctatgtgtcagacattgttctaggcctaggaatggacacttaagtgaacaaagcaaagattctggttcttgtagtttccattaaaagaccatttagtaaaatttttcttcccccaaattataaaatctgtaagatgatttaacaacatgtataaaagtcatcgtaggccgggcatggtggctcataccaggtgtagtgactcatagcgctctgtcactcatgctggagtgcagtggcacaatctctgttcactgcacctctgcctcctgggtataagcgactctcccgcctcagcctttcgagtagcagggactacaggtgcacaccatcatgcccagccaacttctgcattatcagtagggatggggtttcaccatgccagccgggcaggtcacaaactcctgacctcaagtgatccgcccactttggcctcccaaagtgctgggaccacaggtgtaagccactgcacccagccttatttttacaactttgataactttagcgtataccccaaatctgtaagacataatattatcattcaaatgcaactcatggcttctcattgtactctgattttctctagcttttgaattctttattctaatatcagttttaagtctgacataaaagcatgagagttctaatcaaaatccaatcttttatcataataaaaactatcaagaaattattagaatttaaaaaggaaaataggcctattaattagatttgtataacataatattttatgcctatgagtccccaacaaagcctcaagcttctatttagatataaaatgtaaaagtcactactggatccacaagcaggactatggtaaagaaatttctccacctaaactgctcctttaacatgatgttacatgtttattttttcattttggcaaatattgattgaatgtcatcttcgtgttagtctacatcctaagtgccaggatacagaatctgaaaagatggacacaggacctgtcttcagggagttcacacctttttatttcttgagatggagtcccgcccttgtcgcccaggctggagtgcaatggcaagaacctggctcgctgcaacctccacctctggggcccaagtgactctcccagcctcccaagcagctgggaccacaggtaccggccaccaagcccagccaactcttgtattcccagcagagacagggcctcatcatcctggtcaggctggtcttgaactcctgacctcagatggtccacctgcctcagcctcccaaagtgctgggatcacaggcatgagccaccacgccccactaggagttcacactttagttagggaaaatatacaataagcaagccaatttttaaaataagaacttcaatcagatttaaatgctacaaatacaatcacaggaagctgggatgtgaatgatagggctctcaaacagaaaattaagagaaacgattatttcttacgatgtttgtctttctttgtattggtgctcagctgagtctgcagtgcctcagaagcagccttcattttataaaaaatctattatttctccttccagttgttttttctcttcttcgagcttccttatctcctcctgttgaatcattttaagatgcttgaacttgtcctgcagctctttttcagcttctttctccttgactcgctgcataaatctgtttcaactcttcttctctctgacattgatcatagcactcttgtcttttggcttcaaagatttcttgaaaactaactggctggttgtctgggcccagatctgtaaagcccattttctgcagtttttggtacctacagcattcatagtgctgagtgtaggtttttcttttagattttccacattggtacaaagaagcatatcttggagcttaacgaagtcacagtgattttcattttccacttggaaaactccccaaggctagtgacggcctctgaccatccttttaccaactttcacttcatccatactccctaccacagcaaaggataacagcccatgtttttggccgggcgcggtggctcacgcctgaaatcccagcaccctgggaggcgaggggagggatcacgaggtcaggagattgcccgaccaccccggccaacacggtgaaaccccgtctccactaaaaatacaaaaaaattagccgggcatggtcgtgggtgcccgcagtccaaatatctgtcttttctttatgctagaaacatcagttattctcttctagctattttgaaatatacaataattactatagtgaccctactgatctattgaacatttggtctttatttcttttatcaaacagaaagttgacacaatatcctgtcattttaatacacactttaacaattcttccaggctgttattcaacaacaaaaatcaattcatttccatgtgaaatgcaattaatgcttcattcgatgtcatgttttcagagagtttaagtataataaatacttgcctgtttttaatggttttatgaaggtcaaactggactgtgccacagcgataatgggttttgtccttttgtttgttttagaaattggagttctgaatattgataaatctaaaataaattagaaaacaaaactaagagcattaaaatacaaattccctaaataggtcagtgatttgaaagttaaagtttgggttcttcacaatcatattcatttagcaaacacttaataaccactgtactccacgcactaatgctatgaattcagtggtttatcaaaccaacatccagaagtcacagaccataaaccacaatttattttgtgtttacagaggctaaagtctagattcaaccaaaacttattgtgtctgtatattccagactctctacgaggtgctgagaatatgcagaattgaaaaatatggtctcagccctgaagtagttctcagtctggtaaaaaaagaagtttaaaaatggtagaagagccttcccagatgggaatctacttgagttaacttatgaaattaaaattaggcatgaggaatgtggcctgttgccagaactgcaataaggatgaagcaaagaatacacgtaggaaatgacatacaagaggctagaagaggtagggaggagttcaataatattcaaaataatagtggcagctaatacttaaatactttgtgccaggcactatcataatctttttctcacacagttatgagaacaaatttatgagaagtgtactattattaccacaatgtatataattaggatactgaggctttgagcaattaagccacatggtctaaggtcacataagctagtaagtagcaaagatttgaacaaaggcagtatagttacagaacctccactattaatcactttgaagcaccttctatgctagtgaagaattttaatcaaggaagtaaaaaccctcatttatatttaagaaaacagtatggacaatggaatgaacagggtcaagattagaaacagaaaattacaaagcagttattacaatgacccaaggtggatatggtgagacaaattaaaacagagtcaatggagacaaatcagaggagagttattttaatagtggaagaaacaacccttaataccaacttattagaaaagtgatagagaataacaggctgattcccaaatatgtaaccaagatggttgatataatgccaggtggctatcaaagaaaatgcaatacaaattgcagtagcaaataacctattggaatagcagttcactctttcaaaaacaggtttcacaacaaaatatactgctactaaatataagcaaagagacaataagagcaggggtcagcaaactacatccattccccatgcaaaaccctccctactgtttttgtatgttccaagagctaaatatagcttttacatttgtaaagagttaaaaaaaaaatgaaaataataatatttcataaaacacaaaacttacataaaattcaaatttcggtgtttatgaataaaattttactgaaacacagccatactccttgatttgcacattgtctatggctgttttcccacaagtgcagcagagttgagtaattgcagtgcaaatctatatggcctgcaaagcctaaaatgtttactatctggaccagtagaggaacagtttgcttacccttgttttaaagtaatctcaaacctatatcaattgtgaaaataaggaacatgactaaattgcaacataatacttattagattgtaaggttctatgaattgaacatttaaaaagtaaatttctaaggagaaattcctcattcttaaaccttacagaaattagtccctctccctgcaaccattttcttctttaggaagtctttcttggaaccatctcatacttccttgcaatttacacacaaaccctctgcttctgtgcttccttaatttcctaagcatagcataatcacaggactgaacgcaacttgaggacaggaattatccctttcctccctgtgtacacagtgcctagaaaaatgcacatcacatagtaggtaccttatcagtcaaataaatatatctagaaaaattgccttctctgttcccttagatttgtcaagaggtagaaagagccactcttggtgacttacttgcctctcacataggctcataaatcagatacccaatatgtacaattctgattctagactagaggctcaaccagctggctgcctcaaacaaacagtaggtgtgagtgtcgacctttcagtggtttatttgttcatttattcacttatccattcattcaattcatcttttattgtacatcttgtaggagattaaaataggtatgttccttactatcaaagaatttgttatctgatcagaacatatctacaagaaacagcaaaagcaaagaaaaatcagacagatacaagatgtcacataagctgtattcacatttgctaaggaaatgtacccagcaaataagtaaaaactataatacaagcttatcaatagcagatttactaaaccaaaaggaagtatcccctttacaggtatacttcagtagattttataaacaagactcaccagttttcttcttcaggtttaatttctctctgttgctaatacgttttgagatgggtgttgtcacattttttgttttcttaacagctgatgttttaggctctgagggagaaaaatggattcttttgatttctcgcacttctgtatgttctgtaattgcaactctcacatttgcatcttccatgcttccatcgctctttcttttccgagcaactgaagctgttgtcgaagagggtgttacctcgtttttataactcttagatttacttaatattggatctataattggaagataagaatgaaaatcttctttttccttttgattatttattactttttcatgttcacccactgcactgttgagacatctttttgcttttggtttattaatctcagtttggttttctctggtacaggtggccttccttttagtaacagtggcagaaagtattggacgtctcttaggttgtttattgtggctatgactagaaatatcctgaactgcagaaaatttaggattattttgttttataaaactgtagtaatttgacttcatttctactagttcttcaaaaatagctttgggagattttgaaccctgacattcaggaatacgtggcgaaacttcactttttctccaatcttcaggagactgtgggacttgagaattttcatttgataatggtactttacatgtttgctgagatgtacacatatatgccatgttatcttttaaaaattgattaggggataaaataggattaactgactctgattctagatcctgatttagtccataattatcttttatgaaagaatctggacttaaaattttctgataaatttcatgtgcaattgttgattccaaatgcacaggctgtgaattatctttcataaacatatctgatgaaagacatgttactaattctagttcattattagctccatgactattatttacaaaagaatctggacttagaaaatgtatttggctttgtgtaatgttcaaagttgaagaacagttgggggtaagactaagtttactattctctcctctttggccattaacatttacggaattaaaggaagtttcagttacagctttctcattaaaagaaacttttgaaacgttggcactgtgtacatttaatagttccctattttctgatgcatgaagagatgagtaggtagtagatcgacgtacagagagtggcaagcaagttgcaccatggcattcattgaaagcagggctaataggtgatatgggtattttattttcttcaagtattaaagaattgttttctgttgggggaccgccttcattcatagccaagttttcacaagcttgtagtgggctcctaactctgtcaactttttgggaaacactaaatgttttattaacattctgaatatttgaaacccttctgttgtgacttgtagaggctgaaattttcttctttttaatggtatcccaaagactcctctgcaaaaataaggaaaatataccaattaagtttgtagctattgaatattaaataagcaatattacttcaagcctgttatcaaaataagttttatttattattaaacaatttcttagagtaaatcacagaatggttaaaacattacctttttctttttctgctcttctgcatttcctagtaatatagcttggtgtttcagaacatcatttacaagaaatgtcataatctctcttactcggccttctttgagtggtgtccagttaacagaaataacaattttctctttaggctataatcaaaacaatacattatataattacaatagtaattacataataaccaaaacaccttatatacaacttacaatatagtagggcttaataattgttaaccaacactctatatactaaacatttaataaatcaaatatatttctcctaccctatctgcttaattataagaaaaaaagtcactaaaaataacagggttcacaacaaaataaataataaaatcttaactgtattaaagcaatagaacagatagtctctaaatcattttgtttgagtggtttcaaaagatttaattgtacatttctaatttttagatgtgtagagtacttctacttcaaacacaaggaccctgcattatgaagactttatttaaaaagaaatgtaaagatgatcagctaaattccttcttccttacaaattcctctaaggtccacatcatcatactgagatttcttaaacaggtattattgttccaggcataagtgcaggtatcctgtaaaactcatttaatgctaacatccctaggaagcaggtattatgattatgcacattttacagatgaagtaactaacatccagaaaagtctgccaaagtcacgcaggtacctattagaacccaggcagtctaatgccagagtttggactttaacatctacaccccacaccctggcaggtagacagaatctgccaaatttaaacgctgacatgacaaaacaaattttgtttttcaggagaaacagacaagtttctgttttaaaggagaaataatataacatcataaacaactaattttaaaaaataagaatggtgcatttttactctataaaatagtttattctaaaaataccacaaaatttagttccacattataacaaaaaagagtaagttgaagtattatgtggatagaaaagaaatctgtctttccaaagaaaggaaagcaggcagtgattcatgaaacagaggggcggggtgggtaggttctgaagtgtagatagatgaaccattggtgacacacaagttaagggacctcagattagaatctcttttttctgcctaatgaagtggttattagcctactagttcagacctcctcggctaacggttttcatacttttggtgattctactcaatggaaaggtcacagcagtcaaaataaaaacataaattctccagtctttggtgaaggggattggagcattactcttgcaaatgcaatgcagtaaaagaaagctacaggagttcttgaaacaacatttataaaattaaatttgatgcagcattaaaattacacttaacagcaaagaaaaaaaggactaaaatactaaagtgtgcatacatactacacgtatatattgaaaacaactctgaataggtttttttggtttttattgtaggcatttagccagaacaaagctcactatttcaccggaaaaaaaaaccagttacctcgactctaagggtacatatggaaactaaaatgcatattaagatggctgatagaaattttaaaaaaagctgctttaaccaaccaaggtactcctgtcaatcttaaaaaagtgttaaaaaagtgcattgtctattaatttagaacggcaaggctatttcacaacgccttaagtctagtaaaagtgcttgtcaatttaacagagaagtctatataacttgctcctaaagatgctaagtgcgcgcgcgtttatgtgttgtccccgcccaagttagcgtctatcctagccttcaattagagaatatatatatatatatatatataatattgacacatatatatatactcacacacatgtgtatgcgtcaagggcccacccacagttattgaaaaggaactgacttcactctctaagggtcttttctgatttcttttccaagagccacccacagttattgagtgaaagggaactgactttattctctaagggtcttttctgatttcttctccaatcgtcaaccttcctgaggagggtggcaggaaagatagcggagaagcagaacaccggcctggagcacgctcctcctgagacctacctgcaacacgaaacagcgctgcgacacactgaagcccaggtccgcggccgggaagtgggagatcttcacttctgccacctcctcgttagggttgtctagggccagagacagcgtccgtgaggctcccaggagaacgtccccgaagcaaaggaaaggagacctgcagaagtggctgagagacaggaccggcggggaagacgcctcctcctcggccgcggggccccgcagccccgcgggcggcctccgctcggtcgggctcacttcccagcagcctcgccccactcgccggttcgccatggcagattcgagacccctcctggatctccttgccccgctcccacgaggcggctccggagcggggatccgggacttacgctgaccgcttcccctcaggggcggctgtagaggtcgtgggagtgaattcggccctttttcttttccactaacctactccctagaaaacagaaaacaagcccaataaactcgcaaattaaaaagaggagccaaacaagtatggcgttttgactctgtttaaacttgccgcctccaccaatgaggacctccgggcaccgccctcctcgtcacgggaccaatcggtgagcagcatcccctggccaatgagacggcggcgcttcatttgaatgattgcatccggccgccaatcgctatctgcggaggaggtgagaacggtagcggaatcctggccaccgtctaaaacccggggcttagaattgaaattcgtctttatatttttggttgtgctgaagggaagggagtcacagcatttccacaatacatgtagtaatcattgcggtttccaggaacaatcatagataaaactgttacgtaggcaaaaattggtttatgccactcctctcatatgcataccccgcccagaattatattaactttactgtcgcggtttccagggctgaatggtagagatgtaaagataattagtttgtatgaacatgcttattttagtgacaacatagcagggactcagtacatttacatgctgttaattacctcgggacgctgggagcaaaaccaggtaaacaaatgaaacctgagattaccagtaattcataaatgattgttttgactggcaatgcccttcacaaatatcttattagtttttatttcaattgtagggatctaataataattatagcttacatattagggattttttaaattatttatttattttgagatggagtctcgctctgtctcccaggctggagtgcagtgacgtgatcttggttcactgcaacctccgcctcccgggttcaagcgattctcctgcctcagcctcccaagtagctggaattagaggcgcgcctcaccacgactggctaatttttgtatttttggtagagaggggagttcgccatgttggccaggctggtctggaactcctggcctcaagtgatccgcctgcctccgcctcggcctcccaaagtgctgggattacaggcctgagcggcgcccgaccctaggctagggattttttaaaaatcctttacctatttatctcaacctttgccttaaacctacgaggtatctcttagggcgtaggtaccattatttgtatcttacagatgaggaatacaggtcatacagctaagtaggaagtggcataacccagataggtacacatgcctgtaatcccagcagtttggccctagtcttgctcttacccactacactatattgcctctaaaggcagtagaaaacttaaaaaataaaaataatgtctggatgtatgtatggttacacaaaacatgtaaaaagagaagtcaatgggaaatcaaaataaggaagatgagacatgaaattatattcaatggtgtccaatttcacctgaagttggaccttaacaatatttaaacgaaatttttccactgggcacggtggctcaagcctgtaacccagcactttgggaggctgaggcaggcggattcttgaggtcaggggtttgagaccagcctggccaacatggcgaaatgccgtctccactaaaaataaaaaaattagccaggcgtggtggagcatgcctgtaatcccacctaccccggaggctgagacagaagaatcgcttgaacctggggtggggggtgggggcaaggttgcagtgagccgagatcatggcactgaactccagcttgggcaagagagcaagacgctgtcaaaaaaaaaaaaaaaaaaaaaaaaaattctttcatagaggcttaaaaaaaaaaacaacaaaacaaaaccctggagcagagcctcacaagtcatttccagttctcctcagcatctaccccccacgacctctccattagcttagttaggctccaaaaaataaaacttggacggaggagagtgcaagatatgctgtgggagggaggaaacagcctatacagcaaagagttaaaagattttgacagtctaaggtggaatgtaatggtgttagaccaagaggacaaatcataaggaacaataaggccaaatttattgtcatgggtgcactttacccatttaattaatacaatgtccgaagtacctgggaatggctttaatagtttaataggttcactaattgaaaactgaactcagtagtggtttacagtcaggtaggtcaaggccaggcacggtagctcatgcctgtaattccagcactttgggaggctgagacaggaagatcgcttgagcccaggagttaaaaaccagcaacaaagtgagacatggtctttataaaaacaaaaacaaaacaggcagttaggtcaaaatgctcaaactacctggcattctgtacacgaaggagtccaaaagctcaggaagataggaatgttggagaaaatctacatgtgcaacctgcttggccaagtcacatctaaacatgcacaccctccacccattctccttttaccaaggtgttgataaatgcattaactaataaaaaggactccagcatccatgaaaagacctgggtgactattttttataggccagaaatgatgatagaggatcaataatgaaaataggttctctgatctccatgtgaattatatgatccacaagtggtcaaagtcgattggcacttaatagacaaggtggtatagttcttaccacaatatgctaatggcagaattgtaattagaggcagggatctgtggcaatggccagtttctcaagggccctataaataagatgagctatatactatggtgctgcctaacatatataggcagagaaataccacatatgcaaagcaaaaaacctaactgaagccaatgttgtggcagttatgccttttacccactttccaaacttaagacagttcatacacccaaagctccttgactagaaagaaccctgcaacacgaataccataaatcttctctcaacaattccccagagggaactgcagtcatttacccacatgaatatggattgggggcaggaacttgacttcctaagggttattagataatgagataatagctctgcctttctgctatactccagaatcctaaaatgtcactgtggaccaccagacatagtgagagcttctcaagaaccggtgacagatggcatctaagtcagaatctgtcttaccaagtgtcctttggatccacccatttccagaatataaaataggaacacttactgaccacattctcacactggttcctagatccaaggaacaagggcaattattggagaaagggccaagtggaagcccctgaaaatcaccattttcccaccacggcaattcagagattattctgaatacctgagagatgttgggatagtgattttgtccatatacccactttctccacttatttggccagtgcaaaagccagatagattctggaaaatgatagtagattatagcaattaggtgatgatgccaattattacactacagtttcagatgtgttatttttatacacaaatcaacatacctttgtcagctggtttgcagctatgaatcaagcaaaatgcatttttcttgtttttccccattcatccagtattgaaaaaccgaagcactttgtacttaagtagtggtacaatgctgtagcattactgtcctgcctcagggctcgtcaaatttcctacctatactgtaatattgttcagagagacctggatcttagtatcacactggtccattatattgatgacatttgctaattaaacctggtgagcaagaagtacttgtcaagaattgtgtgagtctgagattttatccctcttgcaagctaaagagttagcgtgccagtttcataaaggccagcagaaaatatgacagttttgggttagagacaagactttattattcacagaaaaaacagtagctagagtgtcagcatgttcattcacattgattcctcctgcttcctaagtctcatgggaccatacaaagggcccttgatggatgcctgcacacacagtgggttgtattacaggaaaggaagagcgaattggagatttgactgtttttatagtactatgcctgggcagggagacatcctatcgtccctcaagatttctgcaaacacaatcctgagaaatggcctatgtagaaattaataagggcttcacattcttagcatagccagcaagaatgtgtaggcctgctcagagcccatggtaagttgcatctctcaacaggagcaagcactgtggatgccaataataaaacaaatgtaaaccagatgggacaaagttcagggtcctatcacatctgtaaagtttttagggatccaatggtctgagacatgtcaggctatctcttctaaaataagaggcaacttgtactttgtatcatttgtaaagcctctttagattttggaggcaatgcatgcattattaagacacatctcaccaaaccatttacctagtaaactctaagactgacatttttgagttaggcctggaacaagtaagatctctgcagtaggtctgggctgcaatggcccaaaacactcattccatgacaatccaagatgtggaatagaagctctggcaagtttccagagaagtatcacagtacaaaattccaggtttggagaataagactatgccttcctctgcagaaaatcatctatcatttgaaaaacagatcctaattatgctattaggtatggtagagactgaatgcctcatcaaaggactataagtgactgtgatacaaactgtttattatcaactattacctaatccagggatcagcaaactatggcctaagggctgaatctgacccattggcttttttttttttttttttttttggcaaataaagttttactggagcaaggccataagcatttatttacatattgtctatgccttcacactgcaatggcagaatagctgtgatagaaaacatatagcttgtatagcctaaaatatttagtgtctggccctttacgaaatatttgctgacctgggatctaatctcaaggaccataaaatttgatgtgaagagcaacattgcactatcaaacaaaagcagaatctacaagaccagggctaagcaggccccaaatacacaagtaagtgatacaaacaggtgattcagattttagtaagtatcttttactacttctactactttgccacttccctctctctcaaactacacaggaaaaactgggtatctcttaatgataatttcacaagaaaaaaggcctgatttatgaatgaagctgtatagtaggtcagacataaacagacttacattacagcttctccttaggggtggatgggaatactctcagtgagaattctggatggtatgtttggtagtccacttcataaggaagagaacatggcctaaggtaaagctctgtgctgattcatggataatggctgacaggttggccagctggtcaaacctttggagaaaacaaaatggaaaattggtgacagcttggtctggggaggagcggtatataaaagggcttctcaaaataggtataggaagttaaatttgtgttccatgtaaatgcccatcagagaatatccatggctgagaaggagctcaaaaatcaggtaaaaaggacaatctatcctgtggaggtcagcttcttcccccagagatccatttgcttgcgcgttgaacccatttagaaagtggctatggcagcagtggtggaggataagaatgggctcaaggtggtttcccttgccaaagctgatgtgataagcccctgtggagtgcttaacctactgaaagaggctgatgctgaacatccagtctaattccattctccagtgggaccagctaactacctgtggcatgtggttacattgaacgctttctattatggaagatgcaatattcttcctctctgggataaatatatttttctgagtatagattactgtacctgcccccattatatatatatttacagaaagctttatctataaaccaatgaatatgtaatggttttcacatatgtccaaaaatttgttgctatcctctcttcaagagagggagtttaatttgtgtcccttgcatgtggactagaattagtgacaatagaatacagaagtgatactatatcacttccaagattaggttataaaaagacaacaactgaaatcctgggtacgctctcttttttggattgctttcaggaaagtggtgtgtgtgtggaggggtggggggaaggcggggcaggcagttgccatatcactaggcagccctgtggagaggccatgtgatgaactaaggccaaagaccacgagtgagcttggaagtaaagccatccccagtgaagcctctagagatggcaactgacttaacagcttgatttcaatctcatgaaagaccctgagctaaaaccacccagctaaatccggcctagattccttacccacagaaacttggaggtaataaaagtttgttgttttaagccactaagttcggtataatgtattagacagcaatagtaaactaagtatcacacacgacattggctataatcagaaaactcattttgcagaaatgtgctcatgcctatagaatttactggtcttctaacactcagaagcagctgctgagataaaatagagaaagtctattggaggctcacttatggtgccagatagggataacaacttgcaagtttgggggtaccatcctatagcctacagtttatgctttcaaccaacaaccatttctcccatagccagaatgtatgtttctgggagtgagggggattagaggtaagagtggcccctctcaatattatacagaataactcatttcactaatgaattttactacacttcagacttctctctaaaaaacagcataatatgactacttcaagcataaaagtcatcactaatatttgaatttatattacacttaaaattagtttaatggtttatacatttaatatataaaatatttcaaaacatatagcttatgagaaaatgttttaaaatgtgctgcaagttacttggtttcagagtactgcattcccatcctgtgaaaatgtggttcaataaaacctagatatgctgtattaggaccaaagaactttatatttattttaaatatcaaagtaacacaaagaactagttcaatatacagtacacttcctactcttcacagagaactgaaattttctataaagacatttatacttaggaaacatcagacaaccaaagtatgtataaaactcacaagatattttacacacagttcacaataattaattctgatattttagatttttctgtcattgcttttaaagtatccttaattaaaaacaaaaattattatttgagactgaaaacaagtgcaaaagcatttctactttaatatacactgtaaatccccataatcaaaacatttactacacaatgtggaacagctaaatgcccagttttgtattattttctggcagccacactcatcaattgtaatacagttttatcaatagggataagaagagttcaatcgttagaaggaataaaaattttgtaattacatcacagtacattgtccagctttaatgcaagcaggaataccaagcaaaaaaatacgcagtaacaatgagatgtgtacatcctcttcattcaatacatcttttagaatctccaacagcaatgcaagcattgattacttttctttacctaagaatttgaccaaacaaggttatattctttgtataacctctgtgctctaaatataatccttaatttctcctctgaatataatccttaatttctctttatgtaattggctgcataggctaaatttaaattgttttaggatttttctcaagatcatagatttatgatcatacacagcaagttgaaacatgagtaaacaaaacataagcactctctctacaaaaaccttctttttctcatcttccacacatcttaatcctattacatctatcttattaatgctacttccaaagagaaagagcagaaagcatgctaagattatagggaaaaggtatcttaagtaaaaacaattttagaggaaataaggaggggattccctctaccctcaaaacaaacaaacaaacaaaaaaccccacattagagaaatgtggaaaagggtaggatataaggaagaactgtctagtttctagaagtcgtttagaaaattattctcacattatccattattcactctaacagcaagtagcatttactataacactacttaaagttttagaaatgctacttgtagaatacatttctaggcattttaaatttggcactgaatcttagaatatccaaatacaaccttctttaaagtcctaatttttcctgagttgatcaactcattatatattggttgggatgttgctgctcctaatgagaaactcatctcaaaccatcacctcttgttcagttttaggcaaactgaaataaggtcattcagtgcagggctgtgtagttatggttactggttatttaaaagacagagaaacagagacacagatgcagacacactactcattttattttacttgtcagattcctctaataagcatatagagacaggcccaagagtggcttcacagtaactataaaggccacaacagagatttttaaaatgatatataaatcataaaaacaaatattcacactaacacttagtgccaatttgcctatataaacataaagcaacctaaaaaaaaaaagttgcccaaccagcaggcaacacaatcataacacccataaccaaaaaaaaataaaaataaaaatctattaatcagtacaatctagccagcagaatcaactctaagcaactacaacacatcgaaaaggcacaaagcattcaatgcagaaaagactgggtataaaaggacactgtcaaagagctactgctcaaaatctgacatttcatcactgatatatgagagtgatatggtaggaagaaaactcaagcttataaacatattagtttaactgtgtttttaatttgtttgcaattatattgaaaagcaaccaatgataattacttattaacccttaattagcagtttagagtcaccctacaaagatgctttgacactttttaaggttgatagaaaattattagtgtacctatttcatgacctgccatcgcctaaaaggaagtcacctaataaagcaccaatttaaaaccatatttttgctactcctattctcccagcaataaatgccttaattacttaaatgtatgcaaagactactatctttacagttggttaaatcttgctggcataaggaccaacccctaaccttaaatgggattttaggctgcaaaaaaaataggttgggtttcttacaaaaataacctcaacttgacttaaaaaaattcgaaggcaaaaattattttgatagtgtagtgtaaaaaataggcttatttagcatttagtagtgttctctaaaaaacataacattgtattaattaaactaaggaaaacagtattctcacttataattggtttgtcagtatgactattcccagagtattttcttttgctcctatttttatacatataaacacaataatcaatctcagtattcaaactaacaactttttttttttaaaaaaatccattattctaggacttcaactgtgcttctttggacaaatagttattcaagcaagaaagaatttaaagtcttttaaactatttaatacctactaaaaatctttggtgcatttaagtcaaaacccattagattaacacattcctgcacttgataaattattcaatttacagattaagtgctaactgctatctgctaaaaaattaatttaaaacaataaattatgctcacaaaataaaaaaattctgaatgaggctaaacttagttgcaagattcaaaattttaagtacagttacaaaataaatggattagagttatagagcatttgtccaaaatactctaaatcaaatattacaaaaggtcaactgaaaagaataggcctccttttatactttttgtgccaacttttgtcaaaagcctatatacattcagtttgcccaaatccatgaggttttcacaattgtaaaatttctt

SEQ ID NO: 395 - DNA, 41944 bp, Homo sapiens
acatttaagtctttaatccatcttgaattaattttttataaggtgtaaggaagggatccagttccagccttctgcatatgggctagccagttttcccagcaccatttattaaatagggaatcctttccccatttcttgtttttgtcaggtttgtcaaagatcagatggttgtagatgtgtggtattatttctgagggctctgttttgttccattggtctatatctttgttttggtaccagtaccatgctgttttggttactgtaggcttgtagtataggttgaagtcaggtagcgtgatgcctccagctttgttcttttggcttaggattgacttggcaatgcgggctcttttttggttccatatgaactttaaagtagttttttccaattctgtaaagaaagtcattggtagcttgatggggatggcattgaatctataaattaccttgggcagtatggccattttcacaatattggttcttcctatccatgagcatggaatgctcttccatttgtttgtgtcctcttttatttggttcagcagtggtttgtaattctctttgaagaggttattcacatcccttgtaagttggattcctaggtattttattctgtttgtagcaattgtgaatgggagttcactaatgatttggctctctgtttgtctgttattggtgtataggaaagcttgtgatttttgcatattgattttgtatcctgagaccttgctgaagttgcttatcagcttaaggagattttgggctgagatgatgggttttctaaatatacagtcatgtcatctgcaaacagggacaatttgacttcctcttttcctaattgaataccctttatttctttctcctgcctgattgccctggccagaacttccaacactatgttgaataggagtggtgagagagggcatccctgtcttgtgccagttttcaaagggaatgcttccagtttttgcccattcagtatgatattggctgtgggcttgtcataaatagttcttattattttgagatatgtcccatcaatacctaatttattgagagtttttagcatgaagggttgttgaattttgtcaaaggccttttctgcatctattgagataatcatgtggtttttgtctttggttctatttatatgctggattacatttattgatttgcatatgttgaaccatccttgcatcccaggggtgaagcccacttgatcatggtggataagctttttgatgtgctgctggatttggtttgccagtattttattgaggatttttgcatcgatattcatcagggatattggtctaaaattctcttttttgtatgtgtctctgccaggcttcggtatcaggatgatgctggcctcataaaatgagttagggaggattccctctttttctattgattggaatagtttcagaaggaacggtaccagctcctctttgtacctctggtggaattcggctgtgaatccatctggtcctggactttttttggttggtaggctcttaattattgcctcgatttcagagcctgttattggtctattcagggattcaacttcttcctagcttagtcttgggagggtgtatgtgtccaggaatttatccatttcttctagattttctagtttatttgcatagaagtgtttatagtattctctgaggtagtttgtatttctgtgggatcggtggtgatatcccctttatcattttttattgcgtctatttgattcttctctgttttcttctttattagtcttgctagcggtctatcaattttgttgatcttttcaaaaaaccacatcctggattcattgattttttgaagggttttttgtgtctctatctccttcggttctgctctgatcttagttatttcttgccttctgctagcttttgaatgtgtttgctcttgcttctctagttcttttaattgtgatgttagggtatcaattttagatctttcctgctttctcttgtgggcatttagtgctataaatttccctctacacactgctttaaatgtttcccagagattctggtatgttgtgtctttgttctcatcggtttcagagaacatctttatttctgccttcatttcattatgtacccagtagtcattcaagagcaggctgttcagtttccatgtagttgagcggttttgagtgagtttcttaatcctgagttctagtttgattgcactgtggtctgagagacagttcgttataatttctgttcttttacatttgctggggagtgctttacttccaactatgtggtcaattttggaataagtgcgatgtggtgctgagaaggatgtatattctgttgatttatggtgtagagttctgtagatgtctattaggtctgtttggtgcagagctgagttcaattcctggatatccttcttaactttctgtctcgtggatctgtctaatgttgacagtggggtgttaaagtctcccattattattgtgtgggagtctaagtctctttataagtctctaaggacttgctttatgaatctcagtgctcctgtattgagtgcatatatatttaggatagttagctcttcttgttgaattgatccctttaccattatgtaatggccttctttgtctcttccgatctttgttggtttaaagtctgttttatcagagactaggattgcaacccctgctttttttttttgttttccatttgcttggtagatcttcctccatccctttattttgagcctatatgtgtctctgcacgtgagatgggtctcctgaatacagcacactgatggatcttgactctttatccagtttgccagtctgtgtcttttaatcggcacatttagcccatttacatttaaggttaatattgttatgtgtgaatttgatcctgtcattatgatgttagctggttattttgctcgttagttgatgcagtttcttcctagcctgatggtctttacaatttggcatgtttttgcagtggctggtaccagttgttcttttccatgtttggtgcttccttcaggagctcttgtaaggcaggcctggtggtgacaaaatctctcagcatttgcttgtctgtaaaggattttatttctccttcaattatgaagcttagtttggctggatatgaaattctgggttgaaaattctgtcctttaagaatgttgaatattggcccccactctcttctggcttgtagagtttctgctgagagatcagctgttagtctgatgggcttccctttgtgggtaacctgacctttctctctggctgccctgaacattttttccttcattttgactttggtgactctgacaattatgtgtcttggagttgctcttctcgaggagtatctttttggcgttctctgtgtttcctgaatttgaatgttggcttgccttgctaggttggggaagttctcctggataatatcctgaagagtgttttccaacttggttccattctccccatcactttcaggtacaccaatcagacatagatttggtcttttcacatagtcccatatttcttggaggctttgttcgtttctttttaatcttttttctctagacttctcttctcacttcatttcattcatttactcttcaatcactgatacctattcttccagttgatcgaattggctactgaagcttgtgcatgcattacatagttctcgtgccatgattttcagctccatcaggtcatttaagttcttctctacgctgtttattccagttagccattcgtctactcttttttcaaggtttttagcttctctgcgatgggttccaacatcctcctttagctccgagaagtttgtcattaccgatcgtctgaagccttctcctctcaactcatcatagtcattctccgtccagctttgttccattgctggtgaggagctgcattcctttggaggatatgaggcactctgatttttagaattttcagcttttctgctctggtttctccccatctttgtggtttttatctacctttggtctttgatgatggtgacgtacagatggggttttggtgtgtatgtcctttctgtttgttagttttccttctaacagtcaggaccctcaactccaggtctgttggagtttgctggaggtccactccagaccctgtttgcctgggtatcaccagtggaggctgcagaaccacagatattgcagaatggcaaatgttgctgcctgatcattcctctggaagcttcctatcagaggggtgcccagctgtatgaggtgtcagtcagcccctactggggggtgcctcccagttaggctactcaggggtcagggacccacttgaggaggcagtctgtctgttctcagatctcaaactccgtgctgggagaagcactactctcttcaaagctcagttggaaatgcagaaatcacccgtcttctgagtccctcatgctgggagctgtacattggagctgttcctatttggccatcttggaacctcgattttcgagagttatttcttttaagggaaaagggagctggcaagtttgaaatcggtaaggcaagctggaaggctggaaattcaggtaagagttcagtattgagtctgaaatctacaggacaaggcaagtaggctggaaattgtggtagggtctctgtgttgccatcttgaggccagattctttattcttcaaaaaacctcagtctttttttttttcttttttcagacggagttttgctcttgtcacccagattggtgtgcaatggtgcaatctcagctcactgcaaactccgcctcctgggttcaaatgattctcctgcttcagcctcccaagtagctaggattacaggcatgtgccaccacactcggctaattttgcatttttagtagagacggggtttcaccatgttggccaggctagtctcgaactcctgacctcagctgatccacccacttcggcctcccaaaatgctgggattacaggcgtgagccactgagcctggccaaaacctcagtctttattcttgaggtcttcactagttggacaaggcccactcacattctggagggcaatctgctttaccctaagtctactgatttaaacgttaaccacttcttaaaaataccttgacagcaatatccagattggtgtttgaccacataacctggccccataaccaaataggcacataaaatccattatagtaggtaagacttcgtcaaagaggtctagaaaacatttctgggagaaattaacgaagacccaaataaatgaagcgatatatcatgttcatggattggaagactcagtgcaagtattataaagatgtcagttctcttcaaattgatttttatatttaattcaatcacaaaataccatcagggagtgtgtgtgtgtgtgtgtgtgtgtgtgttgatattattctaaaatttatagggaaatacaaagcacccaaaatagcaagatagtcttgatgaatttgaaaaacaagttaaataacttataccaagaaatatcaagacttataaaattattaattaaaattatctgttattggcacacaaatggacaaatagcagtagaacagaacagatcatatgcatgtgtgcaatcccctgatttatgacaaggtgacattccatgcattgattaaaagacggtcttttcattaaattgtattgaatccattgaatattcatatttttatttagaagggtgtcaaactccactaccacatacatacacaaatacattacagatgcaagttcttggatctaaattagaaagggaagattatgaagcttttagaaggttaatgtaagagagaatatctgttttagcttgtggtaggcaaagattttctaaacaagatgcataaaacattaactataatgaaaaagataaataactggacttcattaaactttaaaacattcttattcattcaaatacatcagcgatggtttgactgtgtgccccaaagttcatgtgttggaaactaatccccaatgcaacagtggtgagaggtgggaccattaagaggtgtttaggccatgagggctctgccctcacaaatggattaatgctactattgtgggagtgggttcctaattaaaggatgaattcagcccccttcttcttgctgtctctcgtttactcttgtgcctttcaccttctgccatgggatgatgcagcagaaggccctcatcaaatgtgactcctctttctcggacttcccagcctccagaaccgtaccagtctgtgatatttggttataggagcacaaagtgaactatgacaacatcattaagagggtgataaggcaaactacagagaggaagaaacttggcaatacatagctggcaaaggatttgtattcatatataatttattatgtaataattgctcattaattatttataattcctacaaatcactaaaaatccagacaactacaacgttcaacacggaaaatgatttaataggtgctctctgaaatagccaacaatcttctgaaatgatgctgactatcctaggtcactaggaaaattcatactaaactttcaacgctcagcctaggcaacatggcgaaaccctgtctctactaaaaatacaaaaattagcctggtgtggtggcatgcccccgtagtcccagctactcagacggctgaagcgggaggattgcttgagcctgggaagttgaggctgcagtgagctgagatcatgccactgcactacagtctgggtgagagagtgagatcctgtctcacataataaataaataaataaataaataaataaataaatactcaatgcagttttagtacaagacccaactgaatggctttgcaaaaaaaaaaaaaaaaaaaagacaataccaaacattggcaagtatatggagccactggaactatcagagattgctcatgagtgtgtaaattggtacaaatgtggaaaactggcaagaagtactaagtctaaatgtatgcatgccttatgacctagcaattccattcctgggcatatttacaggaaggagaaatatgtacatatgtgtatcaaaagacatctacaacaatgatcatacaaaattcttcacaacataggaaaactggaaacaactgaaacatccattggcagtaaaatgaataataaattataatatattccaacaatggaataataaacagctgtgaaaaataagggaaaatattacacatggcaatatagtcaatatagattgtcataaatcaggtgattgtacacatacatatgatctgttttattgctgttttccatttgtgtgccaattacatgattttaattaataatgttataagtcttgatatttcttggtataagttatctaacttgtttttcaaattcatctaaactcagggttgagtttaggaagccagatacgaaaaagtgcatgctgtatgatttcacgttgtatcgcatgatctgggttgtggttacatggaagtgatggtttgttcatgaaactggacgtttgagtgttgtatactttatttgatccttgtacttgtgattcaaaatttcataacaacttcctgctaccctttatgatttgatgtgtgtaagtagagtttgcagataatgtagttctatactgagctatgaatttatttttataatgtacattgttttgtattaagaatcattccaagtgacagaaaatttgcgaaatcaaagtattaacatttataaaacccttctgttgtttatactattctggccatgactttcaaaagcactgatttttagggggacagagtatcaaagaaagaccttggctaaagaaagctctttcaagtgggaagggcatcatagagaatggatcttgaggagtgaaagtcaggagatgccttcctactcagctgcatagctcatgaagctgacaacccgcagagttataaatgttgtgggtagattgccttcacactggccttgcaatcatctgctacactgagcaccattacatttcatggtggacattctaaggtgtgacactgtgtactctgctgtcaggaggctttccggggagaagggtcttgccaaggatttcttgcactcccagccacctgactggtttagtctgaaatttcagtattccagggtagtatgagaaaggccctatctggtaacaaagaaagcataagaaagatggctaagggaacaaagggacaaggcttttattttgttctttacccacagattgccttcaaaataaagataaagcgtctaagcctggcagtgcaggtctctttaagctggctccatacccacccacctcatcctgcacctgtcactgcgtgggaccctgtgctccaggcaggggcacctcactgccccctgagctcattttacccctcctggctctgcagcatttctgaccatttctgcccaggccgagactcactgctgcccagagcaatctcccttctctccttctggaggggaggggttgtatgttacccgcctggttttatccacagaggttagcagagactgatacagacaaaccctttttctttctaattttagattcaagagcacatgtgcaggtttgttaaatttgcctgacgctgaggtttgagtttctattgatcccctcacctgaatagggaacacagtacccaatacacagtttttcaaccattactccccttccttcctccccctattttagaatccccagtatgtagacaaattgtttacttttatagctgtaattaaccttattatagctcagcctcaaccctttagagaggaggaaactaaagcccatgagacttgcttaaagatactaagtgaacatatttattttttaaagtgttaaagtgattaaacaatgtagacgtgaatgaaataaaaagcgtaagttccccatcttcattcccactccatagagctgatcagtatttttacttgcagacattagtggagccgtagagaaagaaaccttttctccaaaagaaggcattactttacacactccgttctgcaacttgttttgttcacttgctatttcacgtcagcccatgcagatgacttaaaacaaattcaaatggagaaaagccttaggcatgtttttctctgcactaaagaggccctgcaggtggctgtggccaacttatgcagtggcttcgagtgaacgaacgtaattagtaattaagcaaagcgggcatccaggacattcagtttcatcttcctggcactttagtgtttaggaagggcctggcctctcggggagcgacactcctcgcccggccactttgtaagaagcatcgagcgtggaaaaggggctggggtcagcactggggccctctgccgggaagagagactggcggccagcacacgcgtctccccaggctgaaatggggcaccctctcgcggcccttccctcccttcccgggctgggtggcaggtcttggctcttctgcgagtaccccgcggctgcggtctcccggcacccgctgagcagcctcgcccgccttcctctcccacccgcccctgcgtgctctccggggctccggcttcctcggtctggtgcctggtgcgtattttggaaaatacctggctcataaccacctcattgagctcccagtgtcccagtgggccagcggacacacacgggtagctgacttccctaacgtgtccccaaagcctccctggattacagcgcccgctgctccatgtgaccccgcgggagccaggacgcgccccgcctcccggggctgcaagttgcgcagggagcgagcgatgcgcagcagagctgggctccgagccggatgcgccttcctttcctctccagagcaggctgcccgcccgcggaatcccgcacgtagagcaacctcgcagcaccctcagaacagccccgctggggcgcgccgggctgccgcggtgacctttccgacgcccctgaccccgcatccggaggcggccggaagtgtcgccggcctcctcccggcgcagcctccgggcctccagtgcaatcactacgccctggggcccggaaaccgttttccggtctttcgctttcggctggggcgtggaggccgcggtgctgcgtaggccgggccgggcgcaggaacagccccgtggcgccctctctggccgccgcccgggcgggaaacgtcgttccggggaccgggcgaccccgcagcggggagcgcgccaggtccgcgcggggaagtgggcggtgtgcggccggcaccgcctcgcaccacgcccccgcgggcccgcactttcccggagtgcaccccgcggccgccagccggggcgatggcggggctctggctggggctcgtgtggcagaagctgctgctgtggggcgcggcgagtgccctttccctggccggcgccagtctggtcctgagcctgctgcagagggtggcgagctacgcgcggaaatggcagcagatgcggcccatccccacggtggcccgcgcctacccactggtgggccacgcgctgctgatgaagccggacgggcgaggtaagggccggcgctcctcctggagcgcaacggggtccgcagccccgttcccaccctccgatcagccaggaacccgctgcttgtggcgctggccgcaggagagaggagcctgtcaccctgtggagaatgcactcccagttctagtcgttgccccttggcacccgccgacactgctagtgccccatcccaaagtgagcattttctttgtgtgtagcacaggatgcggtatttccaaacccctgccctcggtcttttcccacctcaccgctgctcagctctcaaagccctgccgtttcctcctgccttggcttgggaagccttaggaacagaagctccctgggagcacagagcggttttaaactggccaacaccttaacgcccagagccgccctcctctcgctgccactttggaaaataagagactagagattcactggacgcttcctcccggcatcacaagacttgactgctgcttcagttcccgcttgaccttcatactttagccctttaaaggatgttacataataacaattaagagacggcagggccttcaggcagacttctttggagggtgtcaaacgccttgtttattaaagagtgaattttttaattaaaatcatgttttaaaacagagatggacattttattgatggaaaaaaatcacgttaagttagaaagctctcaaaagtacctggtatttacaactccctgtcagggagggcgaactcgatctcagagttttattttcatcagggattacgttgaggtacccagaaatgagaagatttgcccaaaatggcatattttaaaattggcccagaccagaacccagtttcctctgggattatttgttagtaatcgttttacaggctgagcattaactaactccaaagcttgaaggactttttctcattttcacttgttttctctaataaaaataatgctgtaatttcaacttcacaagatgaggcctcatggaagagtgtttaccaaaatattaaaaatactttgacagaaaaaaatcaagcgaactctttgccaaccaaatatcatcatgactgatgtaacaagtaatccaacacagatatgaaaatcacactggtaaaaatcatctcagttaattctaaaagcagagctaaccaccccttttgtcctaaggctttatggtattaaaaaataaactgtacaaaaatatagattttcccctatcccctacccctggaaagtaatatactgaagtctcatcatactgttttggggattccagtaattaaaatctctagtgaataaagacctgtttcaaaacaacctgtgagctgactggactatttaaagtaattctccttgtagtcactttcagagtgaagacaatgacgaatactgtcttttacaaagggactttttattccaccaacaaattctggattttggcatcaggaaaaccactgttcaatttccaacactatatccaagttgtttgagaaattatttaaaactctttaacttagagggttttctttctcctttacttgttaaagtgactatattacagagtcactttaaggattaaatttattgcatgcaaagtttctagatcactgtctagaagtcagttagagtaagttctttagttgtcaatcaagcatttagtaaggccctgctttgtgcccagtgttgacctcaacaaagttggggatatcagaatattctaagatacagtcgttgttcccaagaatcttgtctttcacatacaagaggtgttgcgtttcattttgcggctaatgtccaaacgctggcctcagccatttcaccttgaagattgcagttggcttccaactggcctctaaactctaatctagcattttccagtccattgtgacaaagtctgccttccccagctactcccagctgttggacctgctgccttagaaccacagattgagacctccctgtcccctctgtcagaccagaccagggcaggcagtatatttgcatgacgcaggatgattgacactggtgatttcacccagctcccttcatagcaattttgacaactgcttcatctgagagacatttggaagcagcatagtttatggtgaagttctggagtctcgctcggtacaagccagtttccaccatttactagctctgtgatactgggcagtcgttagaaagaatgcccgttctgggacatcaaaacctaataattattattctctaatagctaacatgcattatgtgtgtttatttgctgtggcaaatactatgttgaaaaaaactttagacttacagaaaagttgcagtattacaggcagttcacacatgctctctacctggcttcctctaacagtaacatattacagaattagtatattcatcaaaatgagaaaacaaacctttgtccaatactggtcacaactttctcatcttgattgaatttcaaatttgatgtttttccccagaattttttcagcagatcattgagtacacagaggaataccgccacatgccgctgctgaagctctgggtcgggccagtgcccatggtggccctttataatgcagaaaatgtggaggtgggtacatgtgaatatgatcagtattgtactgtgtatctgacagtgtgagaatctcaccagaatcaatataacgtgtccttatatttcagccatttcagcacaaaaaacattccactaagtattttagactatataggtgcaatttaatgctttccaggtatagcccgaatcctgggagattaacattctccagatataagtgcacaactgctatcaggtccctttatatttattctttttttgaaaggatatcgttttttagaaacacaaataaattattccgcaaggcaagcacttgttatccaccagacgctattttaagacttcaaaaatatatgactaataaaatatgtttccctcaagttgctcagggtctcatatcaatgataaacttagtccaaatttaaaagacaatgcaaatttgatatttatgggataaatattacaaacccatgctgttgaaattagtcctccaaaaagctgtagtctttttacttgttgaaaggtctggggaaatcatcttgtagtatggtgagaaaaggatttgggtcaggaaacaaagatggggtaaacagagcttctcttcatcgaccaaaattaaagactgaatttcctaggaagtagtgccaggacatgtctttctaattatggtgaaaatgttggagtttctcttgcttctccagaatcctggctcagagaagagagcaagaagggcagacaggatttctgccgctgttggcctagtgttaatagaagttggtgtggtggatgcagatggagatctgtccagagtaggggacttgagcaagaagcctggtgggcaccctgtgctcagccctagaccccatccctcctcccacttcacgtggactctgggtgatccgatcacgttcatggcttccattgctgcctctatgctggggacactccgaacaggcatctccagctcaggccttatcttggctgtctcacttgctttcagaccacagcaacctgaaggcctcaaagttaccatcacctgaaaatacacctatgatttccatctccccacatgtgcccaccctccagattcgcctcctcccacctcactgtccccctccccacattaaataactccacttggttcctggtttatggcgggaaccagagaatcatctgggacatctttcttccccccaactccattgagtccccaagactgaatgccagttttatgttcaaaactctaactgaatgtctttgaggcacaggactgaaaatgaacgacggagaaaataaatgttgtgaatgccctaaaaactagctgtattctagccagtattcctataattacaggaaggttgtttgatgtctgtatgtctctaaagtatgtttttctcttcctaaggtaattttaactagttcaaagcaaattgacaaatcctctatgtacaagtttttagaaccatggcttggcctaggacttcttacaaggtatgccagtgtacctttgtaaagctgtctatagaaatggttacttctacgtgcaacttgttatttcaagaattaacacagggtagctttttctgtagcaggactgttctctcagaaaggaggagaaaggctggaaaggaaggtccagctggcagctggcctttgcccgtcaagaggccaagagtccaggtgaacagttatcttcagctgtggtattcaatagcgactgtcgccagtgttcaggaagactcaggaggtcctgatggacgggagtggacgggatggaggacacagtaaagcaaaggagtgtctggagcagggaaatcttgaaaatccaatcaaaaagatggtcagccccagagaagtacagtgagctggtatctagaaacagggctccatcctctgagagagggccccacaagagcaaggcaggagcctagcagggactttggagaactggagaggggagagatcaaggtagaaccatggagtgtgaggatcatctgaggactgaggtattgatggaaggagaaataaatttattattagaaactcggaacttagaaattgagaaaaattcttaaatttttcaattttatgaatgctattttaaacatgtatagaacaatgtccaaaatactcatattttgtaactatagatgaatattttatagatatgtgtatatctttgtcattctgccaaaagcatttgagaacctgtagatgaagctgtttcaggagaattttgttgacttgctatatttatgctttaatcgttttggatgttacttttctctttctctctctctctctgtagatatattttttgtaaccacatattttatttctagtactggaaacaaatggcgctccaggagaaagatgttaacacccactttccattttaccattctggaagatttcttagatatcatgaatgaacaagcaaatatattggttaagaaacttgaaaaacacattaaccaagaagcatttaactgctttttttacatcactctttgtgccttagatatcatctgtggtgagtctcatcgatctgtttctaaatttatggcataaagagaaaatggcccaaacaggaaatcacactccaccgggaaggcaaatggggggacgggaaagggtgacgggctcttcagcgcggttctacgaccgcactggccttctgaggagcagcagccacgcccagggctgtgagtggggcaggcatggagcaactgcccagggaggcgaagggaaggaagaacaggaacagggagtagaagtggaccgtacaagagaagagggtaaagggaggaagaagaattctgaaatatacaaggacaaagcaggatgtacgtctttagtgtctgccgctgcaaaataaacacgagataactaacgtgcgtgaattgaatggttgcttctcacccatattttatagaaacagctatggggaagaatattggtgctcaaagtaatgatgattccgagtatgtccgtgcagtttataggtaaatggagtcctttcagttattttaacaattattattgatttaggctttaaaaattattgctaacaatttctgcgttgtatctttttatggtttcaaaattaaacattaaactagaagttaacctcatcatgtaagcatgtgtttaagcagtaaaggttatgtaaattatggcacatctagattatgtagtaatttaaaatgattattctctaacattgagattacattatattgtacataatgatgcttacattatgatgctgagaaaagaaagatataaacagttttctgtaccatgataattgttatatttaaaaattattcatagaaaaaaactagcagatattataacagaatgttagcagtgtttctcattgtctcgtgtatgtgtttctcattcttgtgctttccttttgttgttattcttcttcccatattttctgcaccaagtaggtattgttttagtcatcgaaacagtcaattttactctaaaattgcttgcaattattcacctgttaaaaggcagggcaaggacttgatgaagtacagagaagtgcattgagctgagtatatttaagtctcctgctcatttcacttcattttaaccaatatttattaggcatctgtgattttccaatcactgcacagggtactgactggttttgtagtagtacacaaaacagaataacacaggaggcaggcaacggacaaagaaattcatgaactgtaataattgctcaggaagaaaagatcaaattgataccagagagcaaaacaagaaagtgtcctacagagtgagaggccaggaaaggtctttctgaagaaccggcacctaagctggtcctgcaggagatcacataggggtctttctgctctatggctggacatgaaagggaggtgctgggacagccaagtgacagatgggtacttagagagccctcgcttgtagaagagggcagccagttgtcttctgtcactccagaggagtggtcagaccaatgatggaccttaaaaagaggccgatttcatctcaaaccctggtgcagaggtcctaggcagagtgggaaacttgccctggagaagcagaagcagagaccaaatggctatctagtaaggatgttttataatgaatccttcattcctttaaagagcccattattttctgaggcttcatgggatgcgtaatagcccatgccttcactgctaagcataaaacatggagctcttagtagcctctaagacaatcatcgtcattcccacgattgccttcatcaaggccaggtactaaagaagtgctcaagaaatacacatttctgatacaacagctgatgtatttttatcccatttatagaatgagtgagatgatatttcgaagaataaagatgccctggctttggcttgatctctggtaccttatgtttaaagaaggatgggaacacaaaaagagccttcagatcctacatacttttaccaacagtgtaagtccctgacttttacaattgtggtaaaatagacataacataaaatttccctttataaccattttaactgtacagtttggtggtattaagtgcattcacgatgttgtgcaaccatccccaccgttcatttccagaacttttggtaagtccatgatgttgatgttttgttaacatacccggtgtaggactatggagcctatgtctcagaaaataaaacttgaataataatagaaaacaatttttcatataaaaaattatacttaagtataaaaatgtatacttcaattatgtagtcaacaaatattaattaagtactcgctaagtgctaaccaccataccaaatgttggaaatgtagtaatgagtaggacatgtgtatatggtccgtacctgaaaggaagttattctagtaggagaggtgatctatcaacacataattacaacatgtgatatgagctgtgaacacttatgaacaaacagggtgctgtgtaaaagaataaaggaacaaagatctatgtataggagttttctggaaaatgtttggattcggcagtcattttcaaaggcagagggcattgatagcagtatcttaacatggaaaacattaaaactaactagatattagtattctatttccaattcaaaaataaccagaagatagtgatgttgttttgaatataggatgtcaatctttgtgttaataatgtgttttgaaaaagcaagacttaattgaaaatatacatcaaattataatttcagtgtattaaaaaactgcctgtttaaatatgtcctttctttgctgtaaattttggttaaaatctattggagttatgtccttgtggtgaagtacaccctacccccaagagagcaaatgatgaataaatcagtagatgttccatgaatgcaatgttggctgagctggccacagtggagtgtgatcacctggttataggagaatagccagcaggttatatttcataattatatttttccttaaattttgtgcattaatatttaatagcaataattaaatgaattccagactgaatagacaattttattcattgaataaacattgagaattgcctactgaggcctgggctctaggaattccaccaagaataaaaaaagacatggtgttttgccctcaaattgcttagaatctattcaggccacttagtagcaggtttggtcaattacctggtaggaaaagaaggttgaaatgtacaaccaaattaagtgtattggccttcattcttttatccatccaagaaatatctagtgagtatttgttaaatgccaagcagtgctctagaggttggaaatgtatcaatgaacaaagacatgcacaagcatggcagtgtttgagttgtaagagaaagatgctaaataataagtataacgtaagtataatatcacattataataataagtatgacagaagtatcacataatgtcaggtggcaagggaaatggagaaaaagcattgttaggaggcgtcgcagtgctagggacaggggtagcagggatgagggaggtctctctgatcgtgtgacaatgagcagagatctggaagaagggagggggcagccgtgcaggcctctgaggaaagcatttcaggcagcagaaatcgcaagcatagagggtgaattcactaatctgcttgctgtttcttttctcctctacaacatgtaattaagtctataattagactgttgtataatgattgcattcactctaccacttaaactttttctcattagcgcaatccaatctctagggtactatctagtagactatgattctattcttgtgttggaaagactgcaaaaatagcacttgaaaattaggaatttgcgtgacattaaatttgtttttaaaagtttcaccagataatccccaaaatattaatgaggctttactgtattttcacaagagcctatgttgtcgaaatgttgaaataggcttagaaaaataaatgaaagaaactagcatattttataagaaaatgtgttaactagggtgcatccaagtccaaacagaagcatgtgattatcattcaaatcatacaggtcatcgctgaacgggccaatgaaatgaacgccaatgaagactgtagaggtgatggcaggggctctgccccctccaaaaataaacgcagggcctttcttgacttgcttttaagtgtgactgatgacgaagggaacaggctaagtcatgaagatattcgagaagaagttgacaccttcatgtttgaggtattgtatattgttaggttcagatatcattaaacaaatttcagttattgttagaatctttagcattattttttaaaacaatcaaattttaaagtagtttaactaaagaagattcattatattttaattagaaattacaaaatttaagaaactgattaagtaccagctcaacttcttcagaaaacgattttgactagtgctgggcacagcagtagacacatttgtttttcctcaagaaaacctaagatttgtcagagttttcccaagcagaagagcagccagagattgctctcagttctccatgtggcttcaggcttccttctaacctcccagacatgcaagtccacttcctcaccacctgctttctgaggttccagcagatgagcacttagctgctgccatgagctactctacctagaggacagttaagagccctccaacagagaatcagccagttcatgattctaaaaagatctctgatctcaaatttatacatacatatgtgaagtacattttagcaagatagcctaaatattaaatcctacaaagagggactttctctatatgtggattgcaaaataaataaaacatggtttttagaagccatgtagtaatatcgtccacatggggcagagtgaaaggcacctgagtttttaatggctctgcctgccacccacgtgtgagctgctctgcggcagcctctggcggcagtgccagtgtcctgcactctggtgtgaggctccacgacacggtagaagaaggttgtgtgatgggtctttcgatccgagttccagttcaggctctgtgctgattagccaaataagatagttctgatcattccagagttctgtcacaattttcctatgtgtaaagcgagagatggactacgttggtggttttaaacttttttaagcagaaaactttactgaaaataaatcttaagcagaaaatggacatctaaattagctgaaaagtagagaggtgttaagtgtgtgggctctaagatcaaatcccagctaacatgctgggaccatgacctcaagcacctcacctagccgttctgggcctgaatattcttattttaatagcacaagcctcatggaatagttatgatgattagatttgtaaaggtgctctgagaatcgtgattggcccataagtatgcggcacataccgggtgttattattgcatgtcggagtagagagatctcacatcttcaccttgcccatgtactacacacacacacgcatacactcatgtaaacccatgcacacacatgcacacacttacacacacacatatgctcatgcacatacacatgcacagacacatgtatataccaacatacacacattcacatatacacacatacacaaacacatgcacacacctacatacactcatgcacatacatgcacacacaaacatatgtatatccacatgcgcacacacgtgcatacactcacacacaaatatacacacacacccagatactcatgcacatacacacacatgcacacatatacccacatgcacacatgcatgcatacacatgcatgcacacatatacccacatgcacacatgcatgcatacacatacatgcacacaccaccccccacagaggcacacattcatgtacatttatgcaatcatacaaaaacacatgtacacacctacatacacacatgcgcatatacacatacatagatgcacatatatacacacatgcacacataaatgcacacagctatgtacactcgtgtacataagcacaaaggcacacacaaatacatgtacatatccacgtacacacattcatatatgtgcacaaccccatacacatatgtacacacatgtgcacacacacatccatctcctaccaggaacctctcaatctcacgtaaacaatcagaaccagactaatgatttttcttccaactctaacattccttgacattctaattgttttcttctttgcattgaaagggaggcagcataccaggtgtgagtgtgatactgtggcctcctccacaggtcggtgcaggctgtgagtgacactgtggcctcctccacaggccggtgcaggctgtgagtgtgatactgtggcctcctccacaggctggtgcaggctgcaactgcccaggttccagctgtgagctaaaagtgggcgtcctcccctgctccaccagtgtgcctcggtgctttacgtttgccttatcatgctttctgcagttggcagatgaaatgaaatcggaagttcagcagactcctcttatgcatttggatcaggcttccgctcataaattcaaggaaagctattaaaattgtttagccagaatacttccttccgtacttagacaactgagcacaacgggccggagctcatctggagttccgagtaggttttgtaactgcaagtgctaggaaaatgcagaggcgccgacctcaggacctgtaggctgtgtcttttaagaattgcagaataagccccgagcaattcattttaggagctgttttataaaacaagtactttgaagatttctgcacagagaatgaaatattacaaaaatcacttgtgccacataggaaaaatggaaaagtgagatcttttatagaggaaataatttgttttttctttttgtcctcaaagtttcagagaggtagattactgttattgactttccagatacattttttttttttctgaagaactcaccacttttgcatatggaaatgtgctagggagatgaggaggtagataagaagccaggtcctgaaatatcaaatgggtgggaaagaaggttgcccgagacattacactagcttaagaggtggaggcggagacgttacgctaccgctaagaggtggaggtggagacgttacgctggcgtaagaggtggcggtggagacgctacgctggcgtaagacgcggcggtggagacgctacgctggcgtaagaggcggcggtggagacgctacgctggcgtaagaggcggcggtggaggcgctacgctggcgtaagaggcggcggtggaggcgctacgctggcgtaagaggtggcggtggagacgtttcgctggcgtaagaggtggaggtggagacgttacgctggcgtaagaggtggaggtggagcgtccttactgcacagggtgtggagggaatggcgtgggctcagctggctttgtcatcggacacgccgcaggctcagtttctgcctctgtttcccactaagctgtttagcacagaagaagttatttaaccacatctttggcctcagtttttaatctctgaattgtaaagaacagtaatgagtctttcatggagtttttgtgcagattaattcagtttctgcaaagtgcttagtattttgcctaaaactcagcaagtatgaaatgaggttgttgtcaatttttactgcagaggatatgacttagaaccacacctctaccccctggtgcccgtcatcaacaggtgaggcccacctgacagatgggggaaggcagagaagtacagccctgacaagcaggctcgtgaaaatcagactttgttctgttcacaaaggcgcagctcacctcgtgcccatggaacgccgcctttattaacacagcacaggcacgtcccaccagcgtgcaacaccgtgcggcgtggaactgccatctctaggcatgaacctccgctttgcaggcttgtttccttgtttgtcaccgaggcaaggtgctgcacagaattcatttcttatgtttgcagtcacagtgcagtcatcaaatccagagacaattcaaaagaggtttctggtcactcctaatcatcgcagcataactctgctttttaagctattgttttctgcatttgtaggggcacgatacaactgcagctgcaataaactggtccttatacctgttgggttctaacccagaagtccagaaaaaagtggatcatgaattggatgacgtgtttggtatgtttggccccttcactggttatattgtggtactaagtctgctgcagagatgtcactgtgttgtaaacacagtgtaatgagcaggaaggctcccccacgggatcctttccagtaccatcccctttgcaaggcctcgtccattcactcacaggcctctgccagtcgcctggcaagtgactgtactaggccggatgctggggtgcactgatgcgtgctgctgtcctcaagggtctcactgctacccaggcgaaacagaggctttgagtcatgggtcgtgcatttgagtgaagaaggtgctatttgggagaaaggaggagctggtgaaactatttagaaaggtacaggaaagctgtttcgcagattgcctctcaccacaaaggagagaaaatgtggattaaaaaggtggattaagcttcgaggagatacatttctattacacagcaagcagcccggaggaaaagtcctgccagtaggatgtccagggtcccagacttgcccttttgctcccagccatccctaccatcttggcttttgtcctcatgattgacgttccaagcatcacgttcatcttcaaggcaggaagacaggggaggtgggggtaccgggtgtgttggtgtcctgtggctgctgctgtgacaaatccacagacagggaggttcacagcagcgacgtctgttccctcacagttctggacacccgagtcaaagatcagtgtcattgagcccacatcaccatgtgggcagggctgtggcccactgggaaaatatccactccttgtctcttcagcttccggtggctgccagcatttcttggctgacagccgcatcactgctatctctgccagtctctgcatcgccttctcttttctctgggtgtgagtgtgtgcacgcacgtgcatgcatgtgtggtgtgtgtgtgtgtgcatgtgtgtgcttgtgtgtctttcacaagcatacttgtgacatacttgtgatggcgttcagggctcacctggataatctacccactgtaagatctttaatttaatcaaatctgccaagagttctcttcttccaaatagggtaacatttacagattgcagggattaagacctgatattttggggcccattatcagtctgccacaaagaggcttccatagattttatccttgttaaaaatcacgtgtcatatggcccccaatagctgcaaggtgaaaaggaataaagttgagttagccaagcaacaagtggtatctgatgcagttttacagtgagaagcagggaaagaaaactaaaggaataaagctggagagagaaggcattctagaaagagaggaagcagatgagcaacggcacagaagtggaaaggtttctggcatggagggcaatagtggagagtgagagaccgcgagaactcatctctcattcactgggagatgaggatggaaaagcagttttgtgtgcagattgtgctgggactggaatttcatattaagaggcaagcttttattttgcagaatggacaccatctaacacttttggcaacatttttgtcatcattttatctttttaacactgattttagttttgcttagattgccttgagtggataaatttggtcttccaaaagctcacaagttcttttggaataggcttcaatcttttgtatcccctacaaagtttagctcattaccagtttcacaaagctttgtggtcctgcagaatgagtgacacagtcatcattactagaagctttgctctgtgattcttgtgttttctgctcattgtgcctcactttttcttctacccccaatcctagttctagaatttttgagcaactaagctgggctcggtggctcacgcctgtaatcccagcactttgggaggccgaggtgggcggatcacgaggtcaggagatcgagaccatcctggctaacacagtgaaaccctgtctctattaaaaatacaaaaaaattagccgggcatggtggcaggtgcctgtagtcccagctactcgggaggctgaggcaggagaatgacatgaacccctcagggggcggagcttacagtgagcagagattgcaccactgcattccagcctgggcagcagagcaagactctgtctccaaaaaaaaaaaaagaaagaaagaaagaaaaaaacatttgagcaactattctttgtgtagtgagttattactttgcattattaattaataattaattattaaattatatttatattaaaaattatataatatataaaatatattaaaatatataaaaatattaaataattaataattaatactttgcaagtattaattccttaaatgttatttttttttttactgaggtaaatgtcacataacataaaatctaccattttaaaatgtacatttcagcagcatttagtaccttcaccatgttgtacgatagttatgtctacctaattccggaacattttcagcacctcgaaaggaaacctggtaggattaagcagtccctcttgattcctccttcccctggccctggaagcctgtgatttactttctgtctctctggatttacctattccgagtacttcctatatatggattcgtacaatatgtgacctttagtgtctgtttattttacttggcacattgtccattttattttgataatgcataatgttagaaattctgctttagctgtggctatttagcatcccctgccttgatccacatgttcttctttgatgggtatttagcatcccctgccttgatccacgtgttcttctttgaagggtatttgatggatatttagcatccagtaccttgatccacgtgttcttctttgaagggtatttgatgggtatttagcatccagtaccttgatccacatgttcttctttgatgggtatttgatgggtatttagcatcccctgccttgatccacatgttcttctttgaagggtatttgatgcgtatttgatgggtatttagcatcccctgccttgatccacgtgttcttctttgaagggtatttgatgggtatttagcatccagtaccttgatccacgtgttcttctttgaagggtatttgatgggtatttagcatccagtaccttgatccaagtgttcttctttgatgggcatttgatgggtatttagcatcccctgccttgatccacatgttcttctttgaagggtatttgatgcgtatttagcatctagtaccttgatccacgtgttctttgatgggtatttgatgggtatttagcatccagtaccttgatccacatgttcttctttgaagggtatttgatgggtatttagcatcccctgccttggtccacgtgtttttctttgaagggtatttgatgggtatttagcatccagtaccttgatccacatgttcttctttgatgggcatttgatgggtatttagcatcccctgccttgatccacgtgttcttctttgttgggtatttgatgggtatttagcatgccatgccttgatccacctgttctttttagatgtctgcacccccagcccccactgctctttcaggtcatcttatctacttgctttcatcagggaagtctgaccgtcccgctacagtagaagacctgaagaaacttcggtatctggaatgtgttattaaggagacccttcgcctttttccttctgttcctttatttgcccgtagtgttagtgaagattgtgaagtgggtaagtatgctatacctaaagtagaagggagagggaaactttctaatgtctaccttgctccggtctcataatgtattgactacttcttgacagcaggttacagagttctaaaaggcactgaagccgtcatcattccctatgcattgcacagagatccgagatacttccccaaccccgaggagttccagcctgagcggttcttccccgagaatgcacaagggcgccatccatatgcctacgtgcccttctctgctggccccaggaactgtataggtttgtatccatctgaattggtttgacctttcaggcccacttgatggtgggtttctcacagtgatttctttgagatgtgatgtgacattgcccatatgcaacagccttaaaaaaaaaataggtggtttcttttttccctcactgtgctttgtagttttaaaatattacggtcaaaaggtatattagtatattcgcctgcatgggcttccatagcaaaataccacagactgggtggcttaaacagcagaaatttattttctcacagttctggaggctggaagttcaagaacaaggtgttggcagggctggtttctcctgaggcctctctccgtggcttgtagatgccattttctccttatgtcttcacttggtctttcctctgtgtgggtctgtgtcctgatcttctctccagtcagactacactagggcctaccccaatgacctcacttatacttactgacctctttcgattacctgtctccaaatacagtcatattctaaggtatggggggggcttagaatttggagagagacacaattacccataacataaaacataattagcttcatggtagagtttcaaaatgttgtagagttttaattacagtagaatataacttattgtggtaaaaactttattaatgattacttatggttaacctaatttttgtgtttattgcttttaagaatttcattttgcaaatcaaaacagcaaatgcttgccatatggccagctagtacttaagcaaaatgaatgcacatcaccaccctgcattataaacccttttggttttagtatctctagcattttgtcatttatgtaaatgcagacatcggtaaaatgaggccagagtgaaacgggtgaatctgaagcttttttggtgaatccatagtaaatgaaagacccactaagacataatctagggtagtgagtctcaagcttgaaggagctcaggatttatctggatcagctggagtacaaattctctgatcctccccagctatagatgtgcaaggtgggatcagggagggaaactcaagactcttcatctttaacaggtgttccaagccattctggttctccttccacctactgcgaaaatgtaaagtggctcgcttcctatgacaggacctcttgtttctcacatttggggtaaatctataactaaagcgatggtatctacattaatttgaaggtcaaaagtttgctgtgatggaagaaaagaccattctttcgtgcatcctgaggcacttttggatagaatccaaccagaaaagagaagagcttggtctagaaggacagttgattcttcgtccaagtaatggcatctggatcaagttgaagaggagaaatgcagatgaacgctaactatattattgggttgtgcctttatcatgagaaaggtctttattttaagagatccttgtcatttacaatttacagatcatgagttcaatatgcttgaatcccctagacctaatttttccttgatcccactgatcttgacatcaagtctaacaaagaaaaagttttgagttttgtattttcttttttcttttttctttattttttttttttgaaaccgtgtctcactctgtcgcccaggctggaggagtgcagtggtgtgatctcagctcactgcaacctccacctcccaggttcaagcaattcttctgcctcagcctcccaagtagctgggattacaggtgcctgccaccatgcctggctaatttttttgtatttttagtagaaacagggtgtcaccatgttggccagactggtctcaaactcctgacctcaagtgatccacctgcctcagcctcccaaagtgctgggattatagtcgtgagccaccacgcctggccagagttttttatttttatcaccaccatagatgttacagttggctgtggtcacaaaagtagttaattgtgtcagcacccaaataaacatctaacaggtttctcaacagaggaatccacagtccaattccacttcaattgatagacccaaaaaatataatttaatcaaagttctagagtttttgtttgtttgtttgagatggagtcttgctctgtcgcccaggctggaacgcagtggtgacatctcggctcactgcaacctccacctcccaggttcaagtgattctcctgcctcagcctcctgagtagctgggactacaggcgcctgccaccacgcccagctaatttttgtatttttagtagagatggggtttcaccatgttggccaggatggtcttgatctcttgacctcgtgatctgcctgcctcggcctcccaaagtgctggcattacaggcatgagccaccatgcctggcccaaagttctagaattttttaaaggtattcatggtgactcaggaatacacacatacacacacacacacacacacacacacacacacatacacacatataatttgaaagaggtgagtatgtactctgacttcagctctcaggttttaaaaattatattagtgggaccagttatgacaagaataatcattatagtacttttcagattttataacctggagcagattattttaagttgattagtaggttctgttacagtttttcttttgatcgtgcacttatagtcttcatttaattcctcatagaatcccagtcacctttatatatcatattattggaagagattcatcttcataatctccagttttttcacagtgcctcacagagttaatcatgccttttggagctagaaggactttagaacttatctagttatgctcctttatattataagtaagggaatagaatcaataagacagtttctgcccaaagtcatgttaccagttggtgacagagctggaaatacgtagagatctatacccttaaatctctccactcacatgctgatatactttctactacaatatgctatagctttatggaactcagggtgatgatcagacgtgtcattagaacatgagtcctctgcttctgattcaggcatacttttgggattcttccatctttaaaggaaaaaggaagccattcatctatatttagtaacccagtaatatctcacttagtttagggttagatctttagttaattcaaccttatagatcatacttatgaaggtgataactgacacgtgttcactgaattttaatttgataggcaatacatctacccactccattattttttaaaacttcatttaatagtttaaacaagattggttttgttttcaatttttattcactcttcatagaatcacaattacctttatatatcatatgttattggaagagattcctcagtaatctccaatctctcatagtgcctcacagggttggtcaatggcttttggaactggaaggaccttagaacttatctgttatgctcctgatagccaatagcagatagaagcttgcaatcaagagggtaggacatgtgttcttcaatggatatcaaaggaagaggttgcaaaccaaagccatttggcaagccctgtagcctgggccatttaagacaggggcggtctcagccaaattgcacccatttaactatcccaaagagccacagtgcctacaacccaggccctaagttgatgaagaaaaagtcaaggaaggaggtgatacaattggaaatattcccatcaaatggttaatcttatttagaaaatgggcatattagaaaaagtccttccaagatgattttggataataaaagttgtatttgtggaaattggtattatctctgttttatgcacttacatttatcccttacattttgtttttagtgaccctacatgacattaaatttaaagtaaaacattgtttaatgttaccttttggcttgagaatgtctttcagctccagaattattgttactcatattttaatcagtaagtcatttaagctatgacagagtaggaattgagaaattatttcatatgctacagtattgaaatgtggatgctgccttgttttataagaagatgatcaaggtttgtgtgcccattacctttcctctgcctgaaagacgtgtctcaagaaaaataaattctattttagatgcaggtactgcattttattctaagaattgatatcaattcaaaacatagaaaactgtaaaagataaatcaggagatggctgattcataatgggtaataaaataaatagcactttcgagctgatgtcgtcagtgactcttggattttctaacaaaaggttcctttactgttgtcatagagagattgtgaatttctctgactctgaagaatcaactagaagaagtagaatcaccagaacattttgctcagctgaaagcacaaagtaaactcagttactgggaatcagcaaaaaccacaggcatcactggtcccagggatttagagtccagaaacctctccaggtgatggactgttgatttggggctctatgcattgtcacagacagctggggatatcagtttctggaccaaatgacccaataagagatgctggtcgtaaaaatccatttttatctggaatgtttctagaagatcaaaacctttttccttccagcatctaatgcctgagtgatacatttaaaaatttttagtctgcgtgggcaccctctttttctaggagcagcactttttatttttgaaattatcctacaatgaattaccggcttttcttctgttctcatctttttccttccccagcatacacacactgtaaatatgtgccatattcttaggcaatcccactttctcaacctttgttgagtgacccaagcaaggttaaattcgagttctccccaacgagttttcccagctgcaattgaagaagagatacagtccatctctgtggtggaaactccaggttgtgaaactcaagatcaatcagcaatagaacctctggagcagctgctgggtgatgagaagaagcaggcagaagaaatggacagaatcctggaggaacctgagtcccacatggcaggtgatgctgaggctcactgcatgtctgccctgctcactcttcagtgggtccaccctacttgggaacccaagagccagtatattgccgtttgcttaaaaggactgtctttcatttatgaccaaaagcgagttagtgtgtgtcaggtcagccgaaggatgaaggaagggcccccattctctggatatgatcttaggtcttcaccctattttctttgtgctgttcaataattctctgtattggatcatcagcatatatgcccaccagtcctttaaatgcaataccatttaagaaaatgcagagttttctcttttctagatagtaggaaagttaaagttacactgcattgttttagaagacagctaggcttaacctaacacatcagtctagttttttggttctgccatgatgactttctggactaattagtcatttttctcctctaattaaaccaggttcattttcctgctggctagctgtatgccacatttcagggataaatctctcatctctaattactaaaatggactcgttgcatccttgcctcagtttcttgtccagaagttcaccaaatggttatttccttgggctgaattcagttttggaattaactccagcatttagctgttgatcttgttctctttatcctagtagataagtttttggcacgttctttctccttcccatcattatctctcctctttacccgtcactttctttctgttgtggtttgcatttattgatctctgcctttcctgatactactcaatttatgtttcacagaaataacggctgtacttaaatgaaactcagattcctatataaaaatgttgggataactttgttccttcagtaagggtcatacagacattatagatcttatcgggaagaaaaattatcacaatatttagacatgactgtcttattttaaaaatgttttcagtttactttcagattccatatatagttttaaaatacatgttttagctgaatagtaaaaaaaaaaaaaaatatgtaggcacaggagtatctattgggcactcctgggaaggagagtagcctttctttctctttctttctctttctttctctttctttccttctttctttccttccttccttccttccttctttccttgctttcttctttctttccttgctttctctcttgctttctctctctctctccttgcttgcttgctttcctttttttttttctatattctacctctaggctttgcgtccttgcttgcgcaagtcaagcccaagttttaagttttatgcttatggaaatacagtaaattaagacatttatttatttatttatttatttatctatctatctattttttgagacagggtcacctaggccggagtgcagtggcgcaattgtggctcactgcaaccttcacctactgcgctcaagggatcatcccacctcagtctgctgagtagctaggactacaggtgcatgccaccgtgcctggctaatttttgtaatttttcttgtacagttggggtttggccatgtttcccaggctaaattaagacatttaaatcactcaggcacaactaattttttcatattgccacatcttcctaggagtgggattgtgcttcagttttttcagctgtctatgccttaattttgactcccatcaataatgcttgatgttgtagccagtgttggtttattattaccaaaagcaatgctgttctggaaaggcaaggactgcagtgtctcatatgatgcaattggacggaacctcaagacgacatttgctcccagcaaagggcattcagcagaacaaggaccaatcagaattcatccaacaatcattttcagtgtcatctaagactggcaggtaatagcttacatgtgcgattgtgactttcatgtgaggatgagatggtccacaactgcggggaaagcaaccttcctgtcctcaatctcttgtttttaaaagatatttcattccttattcatgtgcttatttatttatcgttttactctttcattcataaaagtctgccaagttctattgagggagctggggaaagacagcaagcaagccccagtcctaccagcaaggtgttacagacagtgggcgtctgaaaaacaacagagaaatggacaaggaggtaacagaatggcagggagtgagaagcgttacgcagaaagacaaagaatggtgaagagacaggaggtggaagagatggaaggtgccttttcagatgagatgcttgctggaggatggtatcctgaggagatgatgtttgagcagtggtctgattgaagtgagtcacgtggggatctgggacaaggggaggtggagagggctccatcctggcacgtgtctaaggggaggttctggagaaaaatcctctttcaagcacgtgcagtttgttggaatattcagtgctttgggatggtaggggtgaaatccccatgttctttttggctcttgtccagagatgactctcaggtccttccccgtgacccatctcaaagccagcgctggagcacttccctgctgtcaatccctcttaacgctctgaatctctctgacatctccttatgctgaccgcagaggaaaactctgcttttaatgggctcatgtaataagatttggcccactctgattgactccattttgattggcacaaagccaagtgtttagtaatcttaaccccatctgcagaattgcttttctcatgtaacataatcatgggcagatgtgatatctcgttttattcactgtccccaggatttgagtgggagatttgggagaatgttttagaattctacttaccacgcctcttttcaatttagttctgatttggttcacctgaatctacagaggtttttttagttttattgtgctactagaatgtaacatgtttcactgtaagaaaactccaactaaacctagaagcatatttaaataggttaaaagtctgtaatctcaccttttagaaaaacaaaccctgagggtttctgctgtgatgtgaaggcagggtgcttttgtcccagttgttttgttgttgttgttgttgttcttgttttctgctgagcctggtagctgatgaaatctaaaatataaactcttttctactgcacaaagtggagagatttgttgactactgctgcaccacttgatatcctaaaagacagcacaacatgcatatttaaaatatgctacttccttctcaccagaaaatattttattggcaacattatcctacatttctaataaatgtagttctgcattccagtaatatacataaaatatttatttaagaatcgactccaaaaactctaatgtactaatcaagatgatatactgtaatttcaaagaatagaaaacaaaggagatttagtgggcaggtcattgtggtctttaaatattttaaaagcagaaaaaggagaatcagttgttttgtgtgggtctagtacgtaaatctaggactgaaggatagaagtttgcaaggaggtgtatttcagtatacaggaagtttttttcttttcttaaaaataaaattaaaatagagctccctgagctctgaaataaaataaaattaaaatagagctccctgagttggagcaggctgcttaggaaaccagtttctcctcagtcgaagtattttgacaggaaggtctaaagtctatgtcagaagtgttatccagcagatttcagccaaccttatctgtagagtcagatagtaaatcttcttggcttttgaggccatgctgcctctgtagcaacttcttaactctgccattgtaaggtgaaagcaggcatagacagcaagtgaatgaatggccatggctgtgtttcaataaaactttatttacaaaaacaggtgcaaagccaaatgtggtctgtgaactgtggtttgtcaagcctgatatattgcatttcctgaattgggtgggaataggacctaaacatcaagccagtcccttccaaatctaagatttcagtgttatatgattctttggtagggtgtaggaaggcatagatatcatttgctaaaatatccctctaggaggagctatccatacccatccattattcactgtgcctgcaagcaactctaataaaaaaaagttctgttagatgaggtttcaactacatgccactaaatactgggaatgttataagcattttttaaaatggaaacctgtgcataaactgtgtgaccctaaaatgaaattagggtccttttgagtgcagcatttttctacctttttttatgtatcatttacaaataaaaattatatatatctactgtgtacaagatagtgttttgatatacatgtacattgtgaaatgattaccatagtcaagctaattaacatgtccattattttacatagtgtgtgtgtgtgtgtgtgtgtgcgcatgtgtgtgtgctgagaacccatcagatctattctctagtgaagttcatgtatacgatacagtattatgaactatagtcaccatgtttgcattagtcagggttctctagaaggacagaactaataggatagatgtacatataaaggggagtttattaaagagtattgactcacacgatcacaaggtgaagtcccacaatagtctgcctgcaggctgaggagcaaggaagccagtctaagtcccaaaacctcaaaagcaagaaagtcaacagtgcagccttcagtctgtggtcaaaggtccaagagcccttggcaaaccactggtgtaactccaagagtccaaaagctgaagaacttggagtacaatgttcaagggcaggaaacatccagcacaggagaaagatgagggccagaagacttagccagtctagtccttccacgttcctctgcctgcttttatcctagcccggctggcagctgagatggtgcccacccagattgagggtgggtctgcctctcccagtcaactgactcaaatattaatctcctttggcaacaccctcacagacacatccaggaacaatacttggcatccttcaatccagtcaagccgacactcaatattaaccatcacaagtccaccccttgtctacttgaacccatacgcatctcctgaaatcatatataatcttcaaataaagataataataaggtcataattatgttaggtaatacataatacagctatccttcgtacaaccagaagtgtaccaatccccaacccaaatgctgttacataaagttaacaacatttaaatgctgatttgaagtaaataaatcttatgtcacatgataaaggaaaaagaaaggaaataaaatgaagatattttcttagtacaagtgtatacatacacaaacatgttcctaacaaaataaggaggaaatatgacaattacagtcctcatttctgcagctggtcacgtgggcatagccggtattgatgactaccttcttctactacccattctgtattccttttgccttcagcaagcatctcagcaggttgtggttttttacctggtggagtgacccaaacattcattcctaaggggtctgggccttatgtagcactgcctggattgggctgttgtagtttcccattgaccttaatcacagggcatggtaatactaagagttgcctgaagggatctcctgtattccttgcatactcttccttacctccactgtggagtaatagactaacttcatcttgatagtccaggtcaatcaccacagccaacactgcaactcccttctgagcctgttgacttagaggtaaaaggatctcaaagtgtccaggtggcaagcttaacttccagtttaatggaatccttgttgtgtcttctggtggcagcatttttccctctgaaactaacacaactaagcaagcagaaggtaatgtattgggaacaggaagcaaaaattttgctagtggatagctaggggtgatggtgagtggtgccacttccacttctgccccttgattcctagacctgtgaatcctggctatgggagaaacggtgccatatattggatgttgattcagagcatacatagccttctggagaattttgccccagccctgcaaagtattgtcccctagttggcattgtaattgtgacttcaaaaggccattccaccgttctatcaatacagctgcttcaggatgacgggaaacaatgttgtacattagatcctccaacttattcacactgcataattggaactttggaccttttgaccaaaaccaccccatagctggcactccccatactctggctaccaccattctactctctgttagcatgactttgacttttttagattctgcatgtagttgtaagtgcctctcttcagatgatcatatgatttttatccttcattttgtgaatgtggtatatagcatttattgagttgcatatgttgaaccatccttgcatcctaggctcagttgatcatgatccttttaatgtgttgttgaatttagtctggctaatattttcttcaggatttctggatctatgttcatcaggaatattgatctataattttaattttattttattgtgatgtccttgtttggctctgctatcaaagtaatgctggcctcattaaatgagattggaagtgtttcctccttttcaattatttgaaagagtttgagaaggattggtgttaattctttaaatgtttatagacttcaccaatgaagacatcaggtgctgagcttttcttagttgagagtttttatttctgattcaacctccttactcattattggtttgttcagattttctatttcttcctgattcagtcttggtaggttgtatgttcctaggaatttatctatttcttctacattatttaattagttgatgtactgtttttcatagtagtctcatgattttctgtatttctgtggtatccattgtaatctttcctccttcatttataattttatttgagttttttttctttttctcctaattaggctaaagatttcttgatttatctttttaaaaacaataacagtgtcattgaccttttctgttgtttttctagtctctatttcatttatctctgctctgatctttattattttctttcttcctctgtctttgggcttagttttttttttttactttcttattgcttcaggtgtaaagttaggatatttcagatctttccattttcttaaggtaggtatttatcgctataaacttccttcttagaactgcttttgctgcatcccataaattttcaatgccacaaattttgtttctcttttcatttttctcaagacattttttgattttccttttgatttcttctttgactcattggttgttcaggagtatgttaattttcatgtatttgtgaattttccatttttccttctgttactgagttctacttttatgccattatggttggaaaagatacttgatatgatttcaatccttaaatttgttaagatgttttccatggcctaacatataacctatcctggagagtgttctgtgtgcacttaaaaagaatgtgcattctgctgcttttgaaaggaatgttctgcacatgtccgttaggtctattggtttatagcattttgaaatccacagtttccttgttgattttctgtccaggtgatctattcattgttgaaagcatgttgctatttatttctcctttagttatgttaatatttgctttatagatttagatgcactgattttgggtacatgtgtatttacaattgttatatcctcttaatgaattcacccttttaccattatataatgaccttctctgtctcttgtgacagtatttgacttaaactctatctcatctgttataaggatagccacctctgctttcgtttggttatcatgtgaatgcaatctctttttcatcccttcacttccagcttatgtctgtccttaaagctaaagttagtctcttacaggcagcatatagttagatcttgttttttattcactcatccactctctcttttgattggataatttaatacatttacatctaaagtaattattggtaggtaaaggcttactactatcatgttgttaattgttttctgattgttttgtagttcctttgttgcttctttttgtctcactgtcttcctttgtgacttaataacttttttggagcaatttgctttggttcctttctctttatgttttgtatatctactacagactttttctttgtggttatcatgaggtttacataaaatatttcatagttataaccatccattttaatctggtaacaactttgactgcatttaaaaatactgtattttaacttctcctcctcccacattttattattcatgccatagtttatatcttttgtatgttgtgtattcattagcaaattgttgtagttatagttatttgttaatacttttgttttttaacttttatactagagttaaaagtgactgttgcacaataacagtattggagtattctgtatttgactgtataagaatacctttaatagagttttattctttcatttgttttcatgttagttagtgtccttttgtttaaacttgagaattccctttagcattttttgtaaggcaggtttaatggtgttgaaatcccacagcttttatttgtctggtgatatgatttgttcctgaacttccacccaaatctcatctcgaattgcaatccccaggtgtcaaaggagggacctgttgggagatgattggatcacgaggtgttttcccccattatgttctcatgatagtgagggtgttctcatgagatctgatggtttaaaagtggtggttacccgtgcgcacatgctctctctctctcctgctgccttgtgaagaaggtacctgcttccccttcaccttccaccataattgtaagtttcctgaggcctccccagccatgaggaactgtgagtcatttagacctcttttgtttataaattacccagtctcaggtgatatcttttagcagtgtgaaaataaacaatacagagaattggtactggcagagtgaggtactgctataaagacaacctgaaaatgtgaaggcaactttgaaactgggtaacaggcagaggttggaacagtttggagggcttagaagataggaagatgtgggaaagtttgaaacttcctagagacttgttgaatggttttgaccaaaatgctgatagtcgtattgacaatgaagtccaggctgagatggtctcagatgg

SEQ ID NO: 396 - DNA, 41932 bp, Homo sapiens
gcccggccgaattgaccaaatattaacaagtagtggctccaggtgagagataaacaggtgttcattgtactatgctttcaacttttctgtaggctagcaatttttcaaaattaagtttgcagggagaaaactagtatgtacagctattatgaatccacaaaatttaaaaattttaaacttaaaaaaatgttaactaaatatgaaccccacagttccaggcatgtctctgttcatagaaactgcctctggggtccatcctcctgtgtcttcgtgggccatcaaccttccagaaccttccatagctgcaacttctgagaaatgaaaatgtaggtcatgagtcagggggcctccaagtcccctcgggctccagtcccctccacatcccagcatgatgtgggaacccctctgggtagcttcctggtcattcttgagtgctctccgggcaggctggacatccctgggcttagagaagggccctaaagcccacaaggtgtggacggacagtttgacccagcactgcctgagatgtccaaccaagcagccccatctagtgggggacaggaggagtgagcgcccccccaccctgtgcccctactagagccctggcacccacccaccccctcccattcccacctggcactcccaccagtcctgggtcctcagcagcatgagaggcggcaggtggtgtagaaggcacgagggctccagaggcagacagcatacaataggtgttcactaaacacctgttgaatgtgtggaccgcttggatgcaaacctagacctgtgatgtatgctcatgacggttttgagtgagcttttactatctccaagcctctgttttcttatctaaaaacagggggtaaaaacagtatttcagggagctgtggtgaagactgagagacagaaaggaggaaaatgtccctgggacacagcaagccccagcaaaaggcggcactcctcagctgtggttgtccgaaactaaaggcggtgggcaagtgcagccagagaagtccccagagaaggctcttgaggaaaagtgtgtgcaagtccctagggcagaggtggagaggaggaaaggtgtctacgccttcctttcaaggacagggggtgaggagacaagatagactcagggtgggaaagaggagcctcctttttgcttctgcaccaaacccaggagagctccaccgagctccgtctaaggcagagacgacaggtctcactgtgcaaggcagggatgccctgggctgtgggagctgccagtgggtggggcctgcacacgtggtctgggagcagtaaccctggagacatcctctaggcacgtgtgaggcctgggagactcggcaaggaggagggctgagagcagtgaagtgtagggacaatgtattaacaacaggctcaaacccctgtccagaggctgggagggctgtagcaactgattacggagggtcttgcaaatgacttacataaacatgggaactgcagttgccaaaactgtgaacagcacgatgcagtcattccatgtctgagttaacaaatccaggatataaaaatgatccaacaggaggaagaacaggctaaaaccagcaaagataacatttggcaaggacaaatagaaagccagagattcaggtcactaaatgcggggtaggggagcagaagagaagggcaggtcccatgggaggagaggcaaagggtgaatttttctccagcagcttgggcggggtggcacctggccagaggcttgttagagttcgtgatgctgcatgctaggaaaagatgagtctggcctgtccggggcctgctctcggagacaggaatggaaacacaggggaggggcagtggacgctgattcgtagctgtgtaattgacagtttggctggtccttgtccctaggtcctgggaggttgcctctaaacccttattattcatggtggatccttgagctacagcccatggtttatgctagcaaggtaactcaggatggggggccaccaggccagaaagaccaaccgtgtaaggagagggttggggctttgagatgtcagcctgacccgggctaagggagaggggctcgaaatgaagtcccgtgagctgtgatccgatcaaccacgcctacataatgaaacccagtaagaactccagacgtcacagctccggtgagtttccctgggcgacagcactctgtgcaccgtcacacacaatgtgcgggaagacagtcgtgtctgggaatgacggaagcttcgtgtttgggacactcccaggcctcactcatgcatctttcccttcggctggttctgacttgtatctttgtgtttataataaaactgtaatcctaagcatcgtgctttcttgagttccctgagtcattccagtaaattatccagtaaattaccaaaccccgattcctgaatttgtagccacccaagggtgacctgccaccaaacttgtggctggagtctgtaggaagacagtcttacggggactgtgtccttaacctgtgaagtgtggcccagacgtcaccgaaacagtgcttactgatttccatcgtgtaaacagtcctgccacgactgtttcaatgctcgcttaaaacagaaccatcagctccctcaagccagcgtggcatgaaccagtgccagcacacggccgggtaggggcagagctgagcggctccaacacagctgagaggaggcggagacagaagccccggggagcagtcaggagcataagggaagaagcacggaaagaaaggagctgtgtcggaggaggctcagtcggcagaggctctgagatagagaaaagatgtgtagatggggaggagggagggaagccagctcagagagagtggtggtgcaaacaggcccaacgttcttcccatgggccaggcaccaccccaggacaactccaagaggtcggtgtaaggtcggtgtagtcatcagctggagagcctggggcaccgaggtccagccgcttgagaaagtcctgccgcttgtcagcgaggaagccaggatttacacccaagcctgcacaccatgccacatgtgtccccactgtgacctggacttcatttccgcttctgttgcattttccccaatctgcactcccttctgtaatggtgcaatccttcatgggcacatgattccagtcctcgcttccctgatgacttcctggaaccccactaaactggggctcagaactgaaaccatttccccaccctcggattaaatgcactgcaatagggctgggcggtcactttgcggcaggctgcttcatcaacagtgtgaggcagatacgcagagaggcaccctttacggaggcccagctatgtgccagaggccgtgtgtccatgagcacatccaatccttatcaagcagaatggctgtggctatccctggtctttaaggaaagacctcagggccctggagtgcttgccaaagccaagcgctagacagcatggaggactggacggacgccggccctgtctgtctgcatcagaagcccagaggactccacgtgtcctgctactcattttgggagcttcaggcagggtgagggaatgaagcatctggggatgcacagtccagcagcgacgttcgggacaataacaagggcagatccgggtctctggttccagcagcctcctgtgcccacagtgcagatgctgggatggtgctccccgtgctctccacacggcctccagaggcagagctgctgggtgttgtctcctcagggaacccccccaccccccgccgtgcgcctctggaatcatctattgatggaaatggcttccacatcctgacagggtgttacttctccttctctctatgtctactaaaagcccacacactttgttgctgttgctttctttttaaaagcttggctataagcgaaatacattctggccacatttcccccccacacagaaggcaatttcagaagtctttgggggtccctggagggtgcccacttgccgtggctgctccaatcccacgtacgacattcatgactcagacttgaggggaccaggagacactctggaagtgacatggtgatcctaggttttcactaagtctgtaatttagaaatccacatgtggtgctatcaacacaattgcctaccacatagctgacatttaaaacccacgccacgtccctggcgtatcgcggtggtggtgccacaccgtcctgaggctgacagggctctcttgatggtgcagccctctctgcggagcctcctgatccactgtccacatccacgcattggccacagcagatctgggccctcggcagagagaccgagatgaaacaagccagtgcggttctaagtatagttctattggaaagtgtttattatataagagctaaattataaatcagagcctgtatataaaacaaagcatttggcagtgactaaaatatctcctcctctgctgtgtttcatcccaagagacacacagtgtggtgctttggggcagggtccttgtgggctgcacagatcccgggacccatcaagatcattcctttattaatttttttatttttttattttttttgagacagattctcactctgtcactcaggctggagtgcaatggcgcgatctctgctcactgcaacctccacctcttgggttcaagtgattctcctgcttcagcctcctgagtagctgggactacaggtacatgccaccacaccgggctaatttttatattttcagtagagatggggttttgccatgttgggcaagatggtcttgaactcctgacctcagatgatccacctgcctcggcctcccaaagtgctgggattacaggcgtgagccaccacacctggcccatcaagatcattcctatccaagcttcattgcctaaatctacgtttgtcccaaaaggtgtctcgtgtgagacattggggtccttcttcccctcattctttatacttcatgatgaaaactattagtggattgagaaagaggaacacaacagaaggacccaaacaaacaaaaagcctgagaatgaaagatattaggcatctttctaaaattaaggcacagcttctgtttgcagcaatacggtagactgaggtattaaaatctcccactacaaaacacctagacatgctggataaagtatgtgtccctctaaatgcatgcacgagtccacagaaaagtaaaaagactgaaggccaaatatgttagagagtgtgttatttttctatcctgccatttaaaaatcaccataatcttagtggcttgagataacgcaaatttactatcttacagctctggaggtcagacatctgacgcaggtctcactgggctgcattccctaagggaaaatccatttccatagctttttccacttctaggggccactgacattccttggcttgtggccccttcctccatctccagagtctgcagcggtgcatctctggccattcttctgtcatcagatctcctctgactctcttgtgcctctctctttcacttgtacgaaactttgtgatgacactgggcccactctgataatccagggcaatcattccatcttaaatcaaatgattagcaatggtaattttatctgcaatttgcatgccatctagcgtattctcaggttctggagactaggatgtgggcatctttggggcagggggcattactctacctaccaccgagaaaaaactgaaaatcaaaaacgtataagtgtggctgacactttggctgccttggatggggaggctagcagtttccaaagggcttgttttcactaaccatgaaggcaagcaatgtggcccaggcccagaggaggggagttagaaacaaggccaccccacaaagaggatcatcaaagggctatactttcggagaataaataaaaatctgttcattgaccaaaagtggccacaaaagactatgtctgtctcagattgtctcaaaatgtttccatgagaatgcacagcctcaggcctgcctgaaagcattgtcaaggaatcccactgttgagaaataataagaaaatagcaatttcaagctgttaacacccctggggtgtctggcaagagcaaatccaaagctcctttgaggaacataccctcagtctgggctgcacatgttctacaagtaaagctccaccaacagagacgcatgccccaaaaccacaaagcaaatgaggaaacaagccatggtgagcaacagtccaagcaacagtgcaccaaagaactcaactcctgggaactccaaacaacaaaacacacagaggtggattataaaataagtatgcttacagtcgttcgataaaaggagtcaagggatgatacaggagcaagacattgttaagataaagaccaggcttgtttgaaaatgaaccaaatagtgtttatagaattgaaaacaacaattattgaaatgatggacatgtttagtagcagattaaatatagctgaaaagagcaatagtgaactggaaactagattgaagaaatttcccagaatgccactcaagagacataaataggtgaaaagtttgaaagaaaagataaaaatcagagaatgaagacagaagatccagttccagtttactagaaactcctaaatgagtaaatgaagacaacagagaaaagcaatactcaagaaaaaaatggctgagaattttccagaattgatgaaggatatgcatcttctaattcagggaggtttttctatgagctgtaagtaaaataattaaaatttatgaaataggagaacttcaagaccaagagcaaggacagccagacagaaatgataaattgcctacagagtgagaatagaatgacctcagacttctcaatagcaataaccaaagtctaaagacaacagaataatatcttcaaagtgccgggagaaaataaccactaatatggagttctatactcaactaaattattttagaatgagggtaacctctagatctaactacaaatatgcaggaaaaacaggggatagaagaacatgctaaatgataccacaggaacgagatcagcaacattcagattgtgggaaattctgcaggaaaaacaattcagtttcttcaagaaataaactgcaagaaaaaaatttaagaaagacacaggaagagagggagagagggagaaccttaaaagatacttaagagacaaatcagtccatctcaaggaataaacattatttgaatagattcacactacttcaaaatttatatttatgagacaattgaaaatttgaatgctgattggatatttgaaaattataatgcatcattgataaatttttagctatttttatggtattacgtgtttttttttaaaaaaagaatccatatgttttagagatatatactgatgtgatgaaatgaaactggactggaaatgaggtgttaaaaattttgaggttggatacattgtggttcattattctatttttgtggttgtttgaagttttcctctatacaagtataataaaaataatagtagttataataaaaggaagtgttagttaaaaaggcttcttccaagaatatgggtaagtaaatagtgctatattaatatcaagaaatattgtgaagagttaaaattaaagaagcagattcacttgtagcaacatgaataaatcacttaaaatgattgagggagcaagttgtggaatgatacagtatgacactatttatattgcaaaagaaaataaaattttaggaccctctaaatgtattatgccaagggagaagttgagccccgagactgagtcacactgcctgtttgcaattctgatgcttagattatagtaccactctctcttcattgttcttgttctgtaaatgactaggaaagactggtgaccagacctcccatttccaatcaccaatctttggtggggagagtgtgggacacaagggagtcagcgggagggttttaggttctgccctggaggagcacttggaggggcctagctcccaagcagaagtggaccctggatgcccaaggctgaccggcagtcataagaagctgcctggtggagaggcactgcccgtttcttggtaagtttggttggagactccctgtttgggaaaagccctgagaaagaacccccaggagggagggtccattttgcatctgtgtctgcccaggctgaagaggctcaggccaagtctccgaggcatcagtcaagtggctcctgtcccaccccaactcctcttcctcccccagctccaaaccagaggagcctgagagcctagggtgggagtggggtagggcaaggcaggaaacagagaggtcaacggcacccagccctgctggcatccagcctccaccgccctgagctgagggaggagagatgctcagctttaagcaaagttttctttacacaggactgcatgttttcattattaaatgagagtgtggcagtggctaaaagtcactggagaactttttctttccaggaagtgacctaagatgtattgagcctgggtgcagtggctcgcacatgtaatcccagcactttgggaggcagaggtgggcggaccacatgaaatcaggagtttgagaccagcctggccaatgtggtaaaaccctgtctctactaaaaatacaaaaattagctgggcttggtggcacacacctttaattccagctatgcggggaggctaaggcaggagaatcactggaacctgggaggcagaggctgcagtgagccaagatggtgccactgtgctccatcccgggccacagaacgagactctgtctcaaaaaaaaaaaaaaaaaaaaaaagtattctgaatagcccaagtcttcatcggaggtggaggagggaggggctagaaatgacacacaggtgtgcagggaccccaagggaaagaggacacacgggagagaggacgtgcggcccagcaactggcgatgctggccagtggactcctgtggctgccagctcagcagccctcctgcttttgtcagagcacctgtccatcacaggccaagcccctcaggagagccacagaaacatgagccaggagctggggaggccccagatcctgagctaagattcctggatggccctggctgatgcttggctggtctgctggtccttccatttgacaaatgcccagtgtccctctgataagttcctttttactttcacctaaatggctctgctgtctctgtgctggtcccccaccttcctgatgggtgtgcttgcctctgccgggaaggggctgtggagccgcctcacgctggcatttgcttgtgctgggcccttggctcgctcatgaaccccggccagcttcccagacctgaccagcaggtgagccctttcatttgcccagcacattcttaaaattggaggttgaaaaccttcaggcagggagtgcccccatgggccccaccaccccctgctgtcataccctgtggtctgacccatttaagcccctgctgggaccacttctccttttcttcctgctatctgacttgtctgtctttccttctcagctgcaaaggctacctgggccccaacaggtcccctaaaccctagcacaaccattgtactattgcagtgtgttaagtcaatcatttctaaccaaccccccttttttttaagagatgggggtctcactttgtcacccaggctggagtactatggtgtgatcacggctctctgcagcctcaacctcctgggctcaagagaccctcccacttcagccttctcagtagctagcactacaggcatgcatcacacctggctaatttttaaaatttttttgtagaaagagactcaccttgtttgcccaggctgctctcaaactcctaacctccaatgatcctcccacttccacctccccaagtgctgggattacaggtatgagccaccacgcccggcctctaacactattgaaagggaaggtagagctctccgcagagcctaatttacaatcagttgtgctggtaaaagcaaatagtaatggaaaatgaatgaatgatgagattattgatcagtcttttgtttctgaaggcatcttttattacggaaatgttcacacgtacacaaagtagagagcataatgtcatgagcccccactcaccaccctgcttccacagttaacaacatctgcctaatcttgggtcatctcttcctcccgcagcctccccaccttcccacacacacaatacccacctcctgcagcaagctgggttattttaaagcaaatccaagatgccataacatttcagccataaacatttatatctttaagagctatctccaagagataaagtctctttttttaaaacataactaccattatcacaacaaaaaaattaacagtaattcccaaatatcatcaaatacacacagtcagcattcaaatttccccgagttgctctctttttttcatgcattggaagaattaatatttttggcttttattttatttttaaaaattatctcttaaatgtctttttacaagtggtttatttgaatctgattcaaacgaagtccagcattgtacttggttaatatgtctcctatattgcttcatctgtaacagttctcctctccccttggttttttttttgctttttggtttttgttttttttagatacggagtttcgttcttgttgcccaggtggagtgcagtggcgtgatctcagctcactgcaaactgcctcccaggttcaagcaattctcctgcctcagcctcccaagtagctggaattacagaagcccgccaccatgcctggataatttctgtatttttagtagagatggggtttcaccatgttggccaggctggtctggaacccctgacctcaggttatccgcccgccttggcctcccaaagtgctgggattacaggcatgagccacctcgcctggcccctcctcttgttttttgcctgtcacgtatttgttttgttggaaacccgagacattggtcctatagacctcactctattctggattttgctgactgcatccccatggagtttgtttgtgtgtttgtttgttatgaagtcttgctctgtcacccaggctggagtgtaatggcggatcacagctcactgcagcctcaacctcccagacttaagcaatcctccagcctcagcctcccaaatagctaggactacaggcatgcaccaccacactcagctaagttttttgatttttagtagacaggatctcactgtgttgcccaagcttgtctcaaactcctggcctcaagcaatcctcctgcctcaacctccccagagtgctgaaattacaggtgtgagccaccacgcccagcccccatggagttttgacatctccctgtataccacatatttcctataaaccagtagcgaacctagaaacttgtccagctgaatctccatttctttggcgtggatgcttcctgggtggcgccctgcacttcctgctacatcacaccaggaggcccccgtgtctggctgcttcccttcctgttcagtgagactcagcagcgggcacaggtgctacccccagcccgcactttgctattcaccctgtgctgatccccaggcagagccacacttcacgagagggtcacactgtatgtatacccagggaataagaggtcacttcaagtcgcttagttattctcaatatttttaaatttcagtctcaaacagaatgcaatttcatctagtttataaaacttaatatacgtatactgctacctcaaagtaatcaatccaacacttggccagttaatatgacctaatttcacatttacctgtacatttacagcattcatactagagttattctgctaccacacagagatttcaactttattatatactttaacaaaaatggtatgtgaaatggatattatgtctatttacttaagggttattttgcagagtgacttactaaatggaaaaaaaactgtatggtctatattagtaagaaagtaatttttggagaaggattatgtaaaaggaattacagaattgggaataagctgtttcaggcatgatgacaaggcaagagcatcaggaaatcacggtgtttcctcttagcaaccggtgagcagcaggaaaggcaacagaactcctcaggacccagcactcccggagccacggcttcccagagagcctggcacaggcacacaactgggtgagggttcttgtgtggatatttaaaacaacaccatcaagataaaaatattgttgtatctgtagcatctctatttatgtatttattttcccttgaaataaaaatgttctaaagttacattgttttccatgctgcctgttttattacttctcacaacttaggcaacaaaattttacgtcatcatatttccagttcttatacgtctgctctactctgtatttagatttggttagaaaatctgattattcttgatttcaccaggagctttcttttttatttatttattatttatttattatttatttcttccaaataaaaactaatagtcaacttcattaggcattatgactagaaaattaagcactcgttgtggagagaaaagtattcttatacagccattttattttattttattttattttattttattttattttatttttgagaaagggtctcactctgtcacccaggctgaagtgcagtggtgccatcatagatagctcactgcagacccaacctcctgagctcaaacgatcctcctgcctcagtcttccgagtaactaggaccataggtgtgcaccaccacgcccggctaatttttgtatttttggtagagacagggtttcaccatgttgctcaggctggtctcgaacttctggctcaagcaatcctcccaccttgacctcccaaagtgctgggattacaggcgtgagccaccgcacccggccagcccttttaagtttgagccctttaacaggatctaaatctggtgctcaggataaaatgttgcctctggtgctttcttcccataattacagtattacagaggcattcttaatgttccctcttcaaattagaaacagtaagttgaaattgccttcaacttactgttgatggcaatttgagcccagatgccagtattagagaacatatattgaagaactgaatttgtaagtaaaccaccatttccctgtacaagtaaatgcacaggatactgccagtcattaaatattgagtctagcacaatgtatgaagcataaaaattcactgccactggtttttaaacagctgtttcccccaaagaaagggcaacttctggtatgcaccagtaaaatagcaacctttttacattactttgcataaagatttacaagtgtcccaggacctgggaggccagtctataacaagacagcctttagcgacatcgctttccttctccacggtgatcagcgaacacaaatacccactgtgtgtcggcgagctggtctgctacatcagcccaggtttaaaatctaggcttactttctgttaacaaatcgcacgtggatgggcccccctggcgtcaggagcccgtgggtttttgcatgaacagcattggtctgagaagatgttttgatctcaaaatgttgaagcaactaagaagagaaagagagagaaggggtcagaattggaacagcagaaaattctcagtgctccctgaatgcttttactcttcctgtggcggcactgggctgcagagagcgcaggcaatgagcacccacatccagcttttggaggctacagaacctccaggtcagtgggaagcccgctgtttggaaacagaactttagatcccgtaccagagcctaggcatgtccactaagcagctgggcagccggtgggacagagatgcaggcagatgctcagatgacttaagtttcacttgccatttcaaattctaactcttttgcttccattgcaggtctagatgaagaaggcatcaaaggagcagggggaaatgcggaacaaagtgaaattccgggtttcctgctggttctgaaactgcagacacttcagacccggccagaaacagaggcggagagagctgaatcctccgaaagacttcatcgtgctactatcctgaatttaaatattcttggttcgtaactttgattccatttctcatttctacagttcaaaagcagaaccagccctgcctcccagggtaaaactggaatgtacctacacggtgagtttgaaagaacacctaaagcaattatctcccccggcggccggctagggtttggagttcaaagtcagccctgggcttaggaatacaggtaacctgctctaaagacttctgtccacggacaggctcctggggggaggagggaccttgctttcagcccatttggaaagggcagggggcagatgagctggcaataccatagtctcctacttagcgcccaggctgtccccgccctgcccttcctctctgtccagctttgtctcccaggcaaagaagctgcacccagaatgggctggggctccaggctgggaccccatggcgtgatcacagctctctgcagcctcaacctcctgggctcaagtgatcctccaacctcagcctcctcagtagctgggactacaggcatgcatcacatctggctaactttttaattttttcatagaaacaaagactcgttttgttgcccaggctgctcctgaactcctaacctccaacgatcctcccacctccgcctccccaagtgctgggattataggtatgagccaccactctcggcctctaacactattgaaaggagaggtagagctctcctcagagcctaatttacaatcacttgtgctggtaatagtgaatagtaatgaaaaaggaatgaatgatgagattgttgatcttggttcgtacctttgattccatctctcatttctatagttcaaaagcagaaccagccctgcctcccagggtaaaactggaatgtacctacacagtgagtttgaaagaacaccaaagtatccatcaccctaaagcgattatctctttaaggtatctcttttaaataattaagagtcagacagggcaccaaggctcaagggtcaagtcttgcaatggggacgcaggcggaactcatgcctttgtcactattaaagaaatgagctgaacagcatgttttcaggcagctacatcatgtgctggcatctgggtggctcagcctaaacacctaacctctgacccctcgtgctgacctctcagaaacgcctgctcattcccatgcggtagagggaagactcacatgtggacatgtgggtctcctaacttcaaggccatcgtgccacacggtattttttcttttctgagtggtttgtttgttgaaaaaattaaaactatgcaggagacaaaagacaaaaaacactgccccccccctccgcccccctacatccagtttccagctcccagggagctggggtggatcttccaaacattcctgttcaatcaaatatctttttcctgattttaagggaacacattaatatcacaccatgaaagctgtccctttccttcccagtagccttcaggcatgttcctgtactgttggggcagacgccatttatttggttaagaaaggccccactgttgggagttgaacaatgagaacacatggacacagggaggggaacatcacacacaggggcctgtcagggggatagggggaagaggagggaaagcattaggacaaatacctaatgcatgtggggcttaaaacctagtggacgggttgatgggtgcagcaaaccaccatggcacatgtatacctatgtaacaaacctacgtgttctgcacatgtatcccagaacttaaagtaaaattaaaaaaaaaaaaaaaaagaaaggctccactgttgcttctgtgccaagagactttcttcattaattggggttgaattttatcaattatcttttgggatgctcatgtaattttcctcctttttatcttggtgaattctactgacagattttctctaggcagaccatccttgcattcctgaatacacctgatgatatgtgaagatgcctttccgttttatacattcagcctgccaactgttgattttgcacattttctatcttcaattattaatcagtcaggccagcctgtagtttttattttccatatcatcctttccaggtttgaatatcaaggttatgcaagtctcacaaaatgagacttcctttttctattctctatttatataagatgatgattacctgttccctgaaggtttgataaaacttgccaataaccctgtctaggttcaggataatttaggggtaaatctttttaccactgactcatttctttgatctgctctcactgattcgatatcttaggtctgttctctttcatttgagtcaatttggatcacttatattttttctagtaaacagtatgctttatctaagtcttcaaattcattggcaaaaaaactgttttaggtattttcttgattaaaaaaaaataaactcctgtctatacagttgtgccttcctgctcattcctggtactatttgtggcttctcttttttttttcttttttttttttttttttgagacagagtcttactctgtcacccaggctggagtgcagtggcacgatctcagctcactgcaacctctgcctcctgggttcaagcaattctcctgcctcagcctcccaagtagctgtgattataggcacccgccaccaggcctggctaatttttgtatttttggtagagatgggatttcacatgttggtcaggctggtctcgaactcctgacctcatgatctgcctgccttggcctcccaaagtgctgggattacaggtgtgagccacagtgcctggcttttttcttaacaattaaaaatcatgggccaagcgtgctggctcacacctgtaatcccagcactttgggaggccgaggcgatggatcacttgaggtcagaagttcgagaccaccctggccagcatggtgaaaccccgtctctactaaagatacaaaaaattagctgggcatggtggcaggtgcctgtaatcccagctactccagaggctgaggcaggagaatcgcttgaacccgggagacagagttgcagcgacccgagattgcgccactgcactccagcctgggtgacagggtgagactctgaaaaaaaaaaaaaaaaatcatgggccaggcacagtggctcacacctgtaatcccagcactttgggaggccaaggcaggtggatcacttgaggtcaatagttcgggaccagcctggccaacatgatgaatccccatctctacttaaaaatacaaaaattagctgggcgtggtgatgggcacctgtaatctcagctactccagaggctgaggcaggagaattgcatgaccccaggaggcggaggttgcagtgagccgattgcaccactgcactctagcctggcgacagagcaagactcaaaaaaaataataaaataaaataaaaaccgtgatgctccctttctacacttgcccaggtagaaatgaggactttttaagcaaaaactttagcagttatattcatatgttgacagcagcaaacaagaccccatcacgagctccaaataccatttcaccgctggcctcttgctcaggtgtctaccccggttcttcaggcagccagagcctgggggcaacaagcatccctcccaactcaccgatgcccttcgggagggtgcagtggctgcgggaggcacagcagcattttagggagctgagaccttcctgaaaacactccccacagcagacttagtgcagggctcagaagatgagaacagcttccacttcttgggcacagactctgtacgtggactgtttttactcctcacacacctatcaggcagggatttggccccttttgtaaatgacgtgacaggctcagctcaggtggctgagaaacctgccaaggtcccggagccagcaagtggcagaactgagggtgaagccagcttgccctgagctccccctacacatcgagctgccactcacatactcccagggacaggggcagcggccacatccacacaaaggtgggatggccacttggtcccaccagccccaccccagcagagtctcatgggccacctgtgcctccagagccagccctgagccagtgggggttctccccacacctcgttctgtgcctcctccctgggcagtagacccttaccttctccagctctggtgcccaccctgagcctgaccatccagaatccctctacccctcctcccagccaaccaggcttccctggtcccttactctcccttctgcccagctccggtctcccagtgagcctggagggggcacctgcatgacttgtaggggaaaagtcaagacacctggatcctgccctgcacctgccactgtgggacttggtaagtggctgttgctttctgagcctcggtttcctcatcagtaaaatggggagatgaggtcaccaggcactccccacattctccaaatgttcaggcaacgatggagctcccaaacttcgggccaaggtttcccgtcgctgaaacagtcttctccaacttgcaggagaggctaatgggtggaattttctccgccattgactttacttttataaaatttccttcaggtgttatttagttcctgctatagcctgaatccagatacggtgcaaacccagaattatgtatcttcacatgtaaggtgttctgtaacaacacccagggcttcctgatgtttcacaacctaagaagcttgagaaccactgctctgtgtaaatggttgggtcagttaaacaaaggagaccagcaagagcaccactgtgcctttcccgggggggggggctgctgctgacggtgcctgagaggccagctcctaactgcagacacggccactagaggtggaggcggggtccccaatccccacagggcctcgcttagacctccagggtttctcagagtgtagccacgcggttggaggacagggtgggcacgggagatggggaggcattttcaaaggatatcatgcagagctcttatttttggatagggtctcactctgtcgcccaggctggagtgccgtggtgtgatcacggctcactgcagccttgaactcctgggttcaagtgagcctcccgcctcagcctcctgagtagctgggaccacaggtgtgagccacagtgcctgacggctcttgatcttaagtttccaaaaccgtctttgcttttcaacctggaagtctttatcctgttgtgcccagtagaaagaggccgaacccaaaggccaacgtttggcctccacgccctacctggatcacgacgaggtgaatctccagttctgcaattctccgccctatgcagctgcgaaccccatgaccaaaggggatggatccaaaattgtcaactctatctaagtctcctttccgcagccagcgctcaggccggaactccttggcccgagggaagttctcatcctggtacgatgtggcatagtggcaaagggccagctgggtctgaggaaatcagggatgacagaaaagggaaaaggggcagaatcactcaagagcagggcagggcccagagccctagccggacagtctcccggggtgctcccgcctgggggccgcccgggtccactcacacccaggatggcagccgctccccccttcccactccacactgcaccccaaatgtcactgcagccactgagaagaccgtcgagcccttcagagactcccagcggtgactggccacttccacacggcctggggagcaggccaaggagcatgggctgccttgctggtgagcagtaagtttccagagcagtgagatcacaccattcccttcctttctcccaacaccccatcttcatcttaaaatacatgcaaaagaaaaggaaacctattgatctctgcttagggacaaagacttcctgaaggtagaagcagattccaattcaaccccgacccgcaaggcctggccacccccatggccccaaactcacgcctttcggaatcagatacccgccaataaccaggtcttcctgggtgacccggccgttccctggcagcactggaaacagcctggaaaagagccagcggggacgggaatggcgtggtgactttcacagtattttattgaacgttcagaaccctggatatattcccatttccattaaaaattcttaaaaagtaacacatggtacattttcaactgaaacattttgcaaggacctttgctgcttctttgttggcttgctttaccagcgagtattctgaggaatgtggaaaagactcccaaagcaaaacatttgcaaaacacaaagccaagcctttcacatgccattgtgttcccaggagggaaattccaagtttctaatattttatgtgaccacgggaccactttatcaaggaatagttcataggacttaaggccccatgaaatgcatttggagaaaagatacttcggcgatcggattatctcagaaaaccctgaataaaactttaattgacaaataccaataaaccccacagccagctgcttctttttttttaattttgaggttcaacagcatgctatataggttgacggtcattatcaagtcagctttgaaagaattctttagtatatactgcagaaaacaagctttgctttttgtcgcagcatttcctcacagaggatgccgtgtttgggggaagggatgtaatccgtccctaatcccacctcctacccaaaccatcccctcaacccaggacaacccacatccctccggcttttctgtttgtcaggaaagccctgtctgggagtaattgagcctcactgggtggcgtctaaacccagatgagaacattcactcaagaaccatgaggtttgtatccaggtctgcaaatcagctgaacaggtcaaactattttcctaacaaatcgatcttgtttcgtgttatcttcagaggaacaaagtcaaaggccattgacccaggaacattttgggaaacccccagtaagccaattggctaaagcagggacaatattcaatgactgctccaaagatcttttttcttttttttttttttttgagacagagcctcgctctgttgcccaggctggagtgcactggtgcaatcttggctccatcacctaacttcaagcgattctcttgccccagcctcccaagtagctgggactacaggtgcctaccaccacgccctgctaatttttgtatttttagtagagacgcagtttcaccatgttggccaggctgctcttgaactcctgacctcaggtaatctgccttggcctcccaaagtgctgggattacaggcgtgagccactgtgcctggcccaaagatctttacagagaacaaggattatgtcgacccataaaacagaatggtctttctgctattctgacaagagcagagaaaaaataacagtcacgaacatcctcatcctgaacaggtcagccgggggggcatttggaggacttgttgtgatagagaaccagggacctaagggacacagtttgttgacggattctggcgagccttttacctcagggtttccttaaggagagctctgaccagcgggaccttggggacatcagctgcagttggaacatgcctttcccctaaattcttcacaatctcccggtacaccgtctgctgcacttctgggtgccttgccaggaggtacacagtccaagacaaggtgaaggacgtctaaggagagaaagtggcagacacaggcaggcagtgagtaacaccagggactgaaacagaggcggtggcaggtaggaagtcccctgggaatacacacagcacaaagtcaaactcatccaattccatatagcacctaatgtcttactaaaaacgaaagactgtttccttaattcatggcaaataaataaataaataaataactgaacgtatttggcaagtgacattgactctatgattcatgtgctcctgtcatgaagagccacaggaaaaatgatcctggagctttttttaatcactgaagagcaatatgtcagggatgccgtggagcctggaggatctgctgggactttgtgtgaccttctttgcagggcttgctcggtgtgtgccagaaagggcctcaggctgccccccggcatccccaggatgctgggcccggcccactctggctgccctaatctagagattggagtgcacaggagatcactagttagccatcgtgtcctgccttcatcaagtaaggtccacacagagcaagtcaataactcgtctatgcaaagcagtgtctttttttttttttttgagacggagtctcgctctgtcgcccaggctggaatgcagtgacgcgatctcggctcactgcaagctctgcctcccgggttcatgccattctcctgcctcagcctcccgagtagctgggactacaggcgctcaccaccacgcccggctaattttttgtatttttaggagagacaggatttcactgttagccaggatggtctggaactcctgaccttgtgatctgcccacctcgggtctcccaaagtgctgggattacaggcgtgagccaccacgcccggtcagccatgtcattttttatacctcttctcaaacctttctacttattgaaaataattgttttattctcgtaggtcccaagattttcgctaaaatcaatagtatcatctatgggactacatttcactctctagtaaacaaggaaatgccacagtataaaggcctttctctttcaccaaaaaaaaaaaactaatttaagcaggcaatattgatatcattttcttgtagaagatatcacgtgttttagagggcagccctcttgtatatataatataatgtgcaaggtcttataaattataaaagattacttagatgcttcctatcaagagaatagaaaatttctatttagatcacatttttatggaaaaaatgtggtatatccatacaatggaatactacttagtaataaaaaagaatcaattactgttctatgccaccacatgaatgaacctgagtcattcttctgagtgcaggaagccagatggaaaagacagcatgctatatgattccattctcatcaatgtttagaaaaatgtggcagtggtttcataaatgattccatctgtcaaaaatctgtatcgcattatgcagtttaaatggagttgactatgcataagttataccgcaataaaatcatactaatttttaaaaatcagtatgaagttgtaagaatttgttccctggcttctattgtaggatgctaaaaggaacagcttccttctgaatgccacctcattgtgatgttcttagttaccaccaggggacaggaggcacaagctcagcgacgaagccattcattgatttcttcacctttcaagtggtgtcttaatttgagcgaatccacaccatcacattcaggtagttaattagaattctcattgattgcatcatttagtttgcatttagttcatatactttttgttttattgttgcacaaaatccaaaagaataaggagtttatgctgtgtgggtttgtttttgttttgttttgttttgtttttcgcttttacatgcttaagtgatattacaataaaaataaagccttgaggcttttttgcccctttaagatgtaggtctgtgcggggcgtgccttattcaaggccgggaagcacccgtgcaaaggaaaagctttgagatgatgggcttggttgtttagtttccccacctgttaatgaagtcaatgactcctaccttagaggaagctgtgagacaggcagggtgtgcgtgcaatgctttggaaacagcgaagcgtcacgcaatcttaattctctctttccacccgaccaccagcagcaccccagcccgcagcttccccagtttccagccagaaatttcattatcttccacccactgaaagcatcagcctagctcctccctgttttgccatttccttttagcaaattttacaactgctttcacctgtacctacacggcgatcattttcacacgtatcctattaattgtatcatattacacatgtgcttttgaaaggaacttggctccttattccccccggaccatgccacccccagccagccaaaaacccatgttaactatctagtgtgttccctccacgcgctgctctgtgttcgcacagtcacggacagatgtgcagatgcacacagccgggagggggcggtgccgctgcatcttactcacaggacacagtatacatgctggtctgcctcttcctttcccatcggatagcctgtgggttccccccaggttaatgggcagtgctctgtctcattctgatatgaaccctccctggtcccagtgtatcattgatctgccatgctactgggctccattcacagggaatttgttgatacacacacacacacacacacacacacacgcactcatcaaccaaactgctttagtttactttctttacactctctttagcaggttttggttttgaagttatgttggctttatagaacaaattggggagtgaatgaaatgaattcttggctttataaataaattccatggcctggaatattttaaatgataactaataaggtttttaatgtctgtaccctcttcatgtatgaaattatgaaacaatgacaaaatgtttacaaatcaggaatgatttgtaaactttaaacatttattatcattttgtgtgtgtgctaatggaattttggttatgcttttcacagaaatcattatgcaccttacatttaatatacaatcatgcatcgtatagtgatgttttggtcaatgatggacccaatatacaatggtgatcccataagattataaagccacatttgtactgtagcttgccaatgtttaagtatgttagatacacacatacttaccactgtgttccagctgcccacagtattcagtacagtaacattccgtacagttgtgtagcctaggagtaataggctctaccgtgcagcctaggtatgtggtaggctaccatctaggtttgtgtaaatacactctaagatgttcacgcaatgacaggaccacccaacaacgcatttctcagaacaaatctgcatcattaagtgaggcgtgactgcatacacagagttttctcctcctggagccccccagcagtgcagcaggcctagtacaaacatgaacagtgtgctaaacaaatctgccttaaaagtagacaacggccagtcgcagtggctcatgcctgtaatcccagcactttgggaggccaaggcgggtggatcacctgaggccgggagttcgagaccagcctggccaacatggtgaaacccccgttgctactaaaagtacaaaacattagctggaagtggtggcgggcgcctgtaatcccagctactctggaggctgaggcaagagaatcacttgaacctgagaggcagaggttgcagtgagccgagaccatgccattgcactccagcctgggcaatagagtaaaactccatcctcccgctccaaaaaagtagacaacgtccatgaggtgatgaggaaggggttatcgtgtgttgcttgctgagaacaggacccccagactcaccgtgtcgacgccggccagcagcatctcagtcacgttggcgtagatctcctgcagcgtcagagcctggctaaggaagaggtatgtgagaagtcccccgctcaccctccggcctcggtccatttggtactgtatgtccctcaacttgttgtcaacatgaatttggcctgtttgaaaacagtatttcttttgaaaggagtttgggttgagaatcatcttttcagtctcaaagccctctgtcctcccagtagcttaactaaaccagtggcaggtgacagagggtaaggaaacccaatttatctaacgtcaacctgggagtttcactcatacacttgcttatgtaaatgaatgaaaagttaaaagacaagctaaacgtatcttcctttttaaaaataagctgtaggatatttgcagatgtttgctttactaatccaatagccaaataaattatttatataatatgagtaacaaaatgcaaactcttttatttttttctaccacactttcagaagagaaaatgagtggaggggaaaaggccacacattattatctgggatgttaccatacagcacagacttcaggacttctatattcaaataaatgttgtggttgttgttgtttccttaagacagaggctcgctctgtggcccaggctggagtgcagtggcaggatctcggctcactgcaacctccgcctcccgggttcaagccattctcctgcctcagcctcccaagtagctggaattacaggcacgcgccaccacgcccagctaatttttgtatttttagtagagacgcagtttcgccatgttggccaggctggtctttaactactgacctcaggtgatcctcccacctcggcctcccaaagtgctgggattacaggcgtgagccactgcacccagcctaaatattgatcttgaaaagacaccatgaaacactttattcagtgttagcattgctctagaacattgttctaagcattttgaaaataatttctttatttttggcaatgcttttatagtaaaaattttagtcacataagaaaacaaatctctttgtaatctcaccttggatttgaacaaaaattgtcacattcaaatgaatgtgcgtggacctgaaactctacattttaagcactgaccaatttatttggagtaaagacatcatcttgcatggacatttacttgtacctgtccctgctagcatgctagtgaaaataaaaattattttaaaatgaaaaaactgatcatgttacctgtagtcacaacccacatgctttttgcttctttgaaaaacaaatccatggccaggcgtggtggctcacacttgtaatcccagcactttaggaggtcaaggtgggtgatcacctgaggtcaggaattcaagaccagcctggccaacatggtgaaaccccatctctactaaaaatacaaaataattagccaggcatggtggcaggtgcctgtaatcgcagctactcaggaggctgaggcatgataatcacttgaacctaggaggcagaggttgcagtgagctgagatcacaccactgcactccagcatgggcgacagagccagactccgtctcaaaaaaaaaaaaaatccaaaagttatgggtccaaaaactaacacgtgactacatctaggcatcctctgctatggtcacccattgtctggatgagagttagacacacaacacggcaggtcaacctgcttctgcaaaaggtgctctcaattcttctcttactgaatttgaagagtccatcccaggacctgcagaattcccgccagggctttgggatgaaggggcgaagccatctggggatggcgcctgcatacatggaggtcttgaacatgctaaacatgagctccagggcctcgatgtattccacagtcagctgtgggatgctgttttccaggcagcccaaacgactctcataaaggatggtggccactcctagacaggaaagagaatttgaaaaccctcttctagattatttaccataccaacaggcaatgttgggccataaatgcaactttcaaacgtggtccaggtgcctttcatgaatgaggcatcgtccctctgaggatttctctgcatcctgaactgcagggtgctggcatttagggctgacaggtggtgctgttgctgcttcacctaaggagccccacagccctgggaggcacagatgaagaagcccactctctggaggaaattcgaagactctgagagtttaagtagcttggctaaggctgcagaggaggaccctgggacagatctggagcacaggtctgaaatgatgagccctggggaggggacaatcaccgagcgtgtcactgctctcccccaacaccctcctctcaggaaggagtcggcaaacctcacatggcctctccctgccccacctggccactggggatcgccttccagccacttgcccaacttgaggaattgaaaagtgactcctcctggccaaaacgcagagcccaggcctggagagctaaaggcgcagcagaagtggcctggatgaatccgtgtcgggcagagctgtgaactgtatttaccaatcacttctgggatgattttgttactaattttagagaaaattaacatcagaactctgcaaagctaacttgagtgaaagttgaaggtaagctttttttaaaaaagatgagaaagctgatagaaagtcctccaagatgcattctatttttttttttttacacaaacatcaccatgttagaccaacatgctttttttttttttgagatggagtttcactcttgtcacccatgctggagtacaattgtgtggtcttggctcactgcaacctccgcctctctagttcaagcgattctcctgcctcagcctcccaagtctctgggattacaggtgcccgccaccatggcccagttaattgttgtatttttagtagagacagggtttcaccatgttggccagactggtctcaaactcctgacctcaggtgatccacccgcctcggcctcccaaagtgctgggattacaggcgtgagccaccgcacccagccccaagatgcattcttaagtaaagagaaagcacggtgcagaacagtatgtttggtgtactaccctttattgtttaaaaataaaaagaatattcacatgcgtttttctgtatgtgcataaaacatctcttgacatatacatgagagactagtgacctttgctgcattcaggaaagagggagaccttcactgaagcctttttggtattgctatttgaacaggaatgtaccactcattcaatatgactaaaagctagaatgagtttgaagtagatgccctctcaacttcactcctttttaaaaattatgctcaaacaaaatgttttttttttttgaacatgtaaattagtaattaggaacatggcttcttgagtttaaaagacctgaatttgaaactaactttctgcctctaaaaagagggatgggggtgtggcattgggcaagttcttttttaagtccagtttcagccaggtgcagtggctcatgcctgtaatcccagcactttgggaggccaaggcgggcgaatcacgaggtcaggagttcgagaccagccttgccaacatggtgaaacactgtctctactaaaaatacaaaaaattagccgggagtggtggcaggtgcctgtaatcccagctactcgggaggctgaggcaggagaatcgcttgaacctgggaggcagaggttgcagcgagccaagaccacatcatagcactccagcctgggtgacagagcaagacttcatctcagaaaaaaaaaaaaaaagtctcagtttcctcattggtcaacggtggttcacaccaggttcacgttagcaccgtggaggtgacatgcatgtatgtcccagacttagcacactgcctgggacccagggaatgatccaagatgacatctgcaggtttggggcaagtatccattcttccctccttcccacctgctgattccacctcaccttccattgaatatttgaagaaaagatcattgacattggtcacggtttctccatcttctgcctggctcctgaggaggtagattcttttaattaagtcagcaataacttggttgacttctccagaataaatggccacatctttcggtttcagaattctttgtctcaatacgcttctcatcttgagccactgttcaccctccctagaagaatcaagtgagtttcaaatcatcttacttacactgacattctgggaaagaattcaaggaacctctagaaaaaatttcagccataaagaatcaacaagagctgcccaacaaagtagaattaagacaggaaagactttttgctggggagagagaagttaataactgcagccctggagcctgttagagcttcttacactcttgcctttgaagcaaactttaaggaaaaaactaccagtggtaagtaataatctttagtaaaagtaatacgacttcctttaaaaaatcttgaaataatattgtaataaagaaatgagattgctaattagcaaaagaaaaatatatatatatatgcatacatatgtatatataaatgaagtaagtactgatattaaaaaagaaaaagagggccaggcatggtggctcatgcctgtaatcccagcactttaggaggccaagatgggtggatcacctgaagtcaggaattcaagaccagcctggccaacatggtgaaaccccatctctaccaaaaatagaaaaatttagccgggtgtggtggtgggcacctgtaattccagctactcgggaggctgaggcaggagaatcacttgaacccgggaggcagaggtcatggtgagccaagatcacgccattgcactccagcctaggcgacagagcgaaactccatctcaaaaaaaaaagaaagaaagagagagagagagagagaaaaggaaggaaggaaggaaggagggagggagggagggagggaggagggaggggggagggaggaaggaaagagagagagaaagaaagaaaagaaagagagagagaaagaaagaaaagaaagagagaaaggaaagaaagaaaaagaaagaaagaaagaaagaaagaaagaaagaaagaaagaaagaaaggaaggaaggaaggaaggaaagaaagaaggaaagaaagaaagaaagaaagagagagagagagagagagagaaagaaagaaagaaagaaagaaagaaagaaagaaagaaagaaagaaagaaagaaagaaagaaagaaagaagactgcagcttgttaccagggtgtgggaaagaaagagggactgcagcttgttaccagggtgtggggccttggggctcctggctgcactcggagagcacccaggtagcaggcccagcacaccgctcccagtgaaggcaggacgctgagggaaccccttggaggtctgaggagtgttctgcagtttctcagagggtcgtggcaggactgagcctcaagtgcccacgagcgtcacccacacctccacacctccgcatggcttgcctcccaaccctgctccactttcgcgttctcaaggagaccacctgcactcaaagccttgcctccagatggactttggaggacccaagctaagccagcccggcgcctgggcctaggcactgcccttccctttgctgtccactgtgctgaagtcaccagcaccgcctctctccatctcagccgaagaggggtccaggcacccacacaggctcctgagcctgcagctaacggggcagacagcagagagattctgcctcagcattcgggcccctctaggcctgaacatccaggaggagctgtttaattatttcccccaggacggaaattgagggaccctggtgacatctggtcacgattcttatttatcttacttgagaaattggtggctgtatttctccccaatttatgtataaggacatagatatcaaaagagctgcaaacagaagtcccaccccatggggatttggaccggggcatctgcaggcgccctgggcctccctgcctggccgcgggccacgatctcttggaaggcacagaggtgttggtgacgctggttcaaaatgaataatcacagtctgctatgagacaggaaaatcaccacgtggcgaccaaggctggaggttcttagcccctcgtcaaagggattttcctgaaatagtgaccacctcctttccctgtgcacagacaagggcgctgtgagttttgtctgcctcggttatcactgaatggactcccaaagccacaaagccctgcttccgaagcgctctgcccaccacggagccagcgtcgcccctcctggctcctgacgggacaactctgcacggaggaggagccagaaagcccagcagggctctcatgtctgggagatcgcacaaggagactgtctgatatcattccatgggggggttctgtgcttttttaagagctggcttttaggaactcagctttggaggagggggcctccccctgagctccccctccagcccgtggctcagcccgggcccacatactcacgccgagatgagcccggtggctctcccccgcaagtctcggtactcccgccaggactccatgttggctctctggggcgcagcgccctccgcccggagcacctgagccaccatatcgcggtctgcaatagatactacaaactgaggaccaaagtgagacttgaagatttttccatattcccgtgtgtgcttctgctgcaataccatggagaaatcaaaaaaggaaaaaatacatagatatgatatacctttaacataaacatcctgtgtgctagaggagcagaaaattggggcagagggaagtgctatctaacacagcactgaatcagagcagtaatttacatattgctgagataaacatgttttcacataaccatctcttttttgttgtttccgtttgtttgtttgtttgtttgtttgtttgttttttagagacagggtcttgctctgttgcccaggctggagtgcagtggcataaacatagctcaccgcagcctccaactcctgggcccaggcaatcctcccacctcagcctcccaagtagctaggactgcaggtgcacacctccactcccagctaattttttattttttgtagaaacaggggtctctcaatgttgccaggctggtctcgaactcttggcctcaagtgatcctcctgcctcagcctcccaaagtgctgggattacaggcatgatcatggaagttttcttattctttagggatatgtttttaaaactaccttagctgtgtgaagcaacaagagagaaatgtcattataagagacaaatgtccagagcaaacagagccctgtctgccagcccctttccatgggcccaacagctctacccaagcagtaccaagccaactctgcagagcaagccctctgtggacagtctgtaacgagcctctaaaactgactcccagcaagaaaatgaaggaaaagacatctggattggaaatgaagaagtcaggctatctctattggcagatgacgtgatctcacatacagaaaatcctacggaacctactaaaaaactattagaactaataaacaagttcaataggacacaaaatcagtatacaaaaatcaattgtatttctatacactagcagtgaacaatccaaaatgaaatttaaaaaacaattcaatttacaatacatcaaaaagaatacaatacttgaccagctgcagtggctcatgcctgtctgtaatcccagcacttttgggaggcttaggtgggtggatcgctagagcacaggagttcaagataaggttgggcaacatggcaaaattctgtctctaaaaaaaatacatggctgggtgcaaaggctcatgcctgtactctctgcactttgggaggccaaggcgaggggatcacctgggttcaagagtttgagaccagcctagccaacatggtgaaaccccatttctactaaaaacacaaaaattatccaggcatggtggtgtgcacctgtaatcccagctactcggaggctgaggcagtagaatcgcttgaacccaggaggcagaggttgcagtgagccgcaagactgcgccattgcactccaccctgggcaacaagagtgaaattctatctcaaaaaatacatatatatacaaaaattagcgaggcatggcagtgtgagcctgtagtcccagctactcaggaggctgaggtgggaggatcacgtgagctcaggaggtggaggttgcagtgagtgaagattgtaccaccacactcaggcctgggtgacagagcaagactctgtcacaaaaaaaaaaataataatattcttagaaataaatttaacaggagaagtgtaaaacctatactctgaaaactataaaacattgtctaaagaaatctacaaaacattgtttaaagaaatctacaaaacattgtttaaagaagcctgaaataaatggcaagacatgaaataaatggcaagatatcccatgttcatggactggaagacttaatattgttgagaaagaaatacacctcaaagtgtataaatagattcagcacaatccctatcataattccagtgggcttctttgtagaaactgataagctgatcctaaaattcatatgaaaatgcaagagacccagaatagcctaaacaatctcgaaaaaagaacaaagctggtggacccccattttcctgtttcaagacttagtatgggagaggggccaagatggccaactagaagcagtggtgctcagaggctcccatcaaaaaaaacataataagcatgtgaaaccttccctggcagccagggtatccaggttctctcatcaaaattgactagaaggctggcataacccacggagagaaggaagaacagtgtagtgcagtggcccacctggaagccacacggggaagggaacccactccccccagccaagggaggtggtgagtgagcgggctacccagctggggaaactgtgctttttccacagaactgtgcaacctacaggtcagaagatcccactctcgaacccatgccaccagagccaagcatcccaaccctggtatgcacagattcctacagcctctcagctggaatctgtttaagcctactgaactcctgaggggatgggcgaccagcaccagctgcggctgcctgctgtctaagtaatttgagctccttgggggaggggcagcagccagcactgggactcacaactgccaacaggctaagctccctgggttggggaagggtggcacccatttctatagctccaggctgcacttttcccctgctggagccagggaggctggatggcttggtcccaagagttatccccacagctcaacacaccagctgtggcagttggcagccagagtgcctcttcaggtctaaccctgatccatccttcctcagtggctggggattcccagcaggatctccaacaattccagtcagaggctcggggacagaactctgatctccctgggcctgagcccttggggaaggggtggccacagtctctgcggaccagcagatttagcctcttctcctggtagttctgaggaatccaggcaatccagactagtgggtttcccccaagcaaaacacaccctccccaccaagggacaaagtgctttattaaaaggttcttgctccccatgccacccaactgggtgagaccctccaataggggttgtcagataccctatacagaagcaatcctactggcatcaggttgatgccccttgaggtcagaggtcccagaagaaggagcaggcacccatcattgctgcacttcagcctccttgagtgacatctccaggcacaggagcaaatcagaagaatagggcctgaagtgaacccccagcaaactgcagcagccctacagaagagggattgactattgaaagaaaaacaaacagaaagcgacaacaacagcattgataacaacaacaaaaaaaggcccccacaaaaaccccatccaagggtcagcagcctcaagactgaaactagacaaactcacagagatgagaaataatcaacaaaaaaatgctgaaaaccaaaaggcctgagtgcctcttctcctccaaataatcacaatgtctctccatcaagagcacagaactggatggaggatcagatggacgaattgacagaagtacacttcagaagatgggtaataaaaaactgcgatgacctaaaggagcatgttctaacacaatgcaaagaagctaagaaccttgataaaaggttagaggaactgctaactagaataaccagtttagagaggaacataaatgaccagatggagctgaaaaacacagtgtgagaacttcgtgaagcatacacaggtatcaacagccaaatcgaccaagtggaagaaaggatatcagaatttgaagaccaccttactgaaataagacatgcagacaagaatagagaaaaaagaatgaaaaggaataaacaaagcctcaaagaaatatgggacttcataaaaacagcaaacctacaatcgactggagcaccagaaggagacggggagaatggaaacaagctggaaaacacacttcatgatattatcaaggagaacttcctcaacctagcaagacaggccaacatgcaaattcagaaaatacagagaacaccattaaaatactccacattaagatcaaccccaagacacatagtcatcagattcttcaaggttgaaatgaaggaaaaactgttaagagcagccacagaggaaggccaggtcacctacaaagggaagcccatcagactaacagtggatctctcagcagaaactctatacgccagaagagattgggggccaatattcaacatagttaaagaattttcaacccagactttcatatccagccaaactaagcttcataagcaaaggagaaataaaatcctttccagaaaagcaaatgctgagggattttgttaccactgggtctgccatgcaagagctcctaaaagaagcaccaaataagtaaaggaaaaaccagtaccagccactgcaaaaacacaccaaaatataaagaccaatgacactacgaagaaactgcatcaactagtgtgcaaaataagcaaatagcatcatgatgacaggatcaaattcgcacataacaatactaaccctaaatgtaaatgggcaaatcccccagttaaaagacacagactggcaaattggataaggagtcaagacccatcagcgtgctgtattcaggaggcctatcttaaaggcaaagacacacagaggctcaaaataaagggatggaggaaaatttacaaagcaagtgaaaagtgaaaaaaaaaaaagcaggggttgcaatcctagtctcagacaaaacagactttaaaccaacaaagatcaaaaaagacaaagaagggcattacataatagtaaaaggaacaattcaacaagaagagctaactattctgaatatatatgcacccaatacagaagcacccagattcataaaacaagttcttagagacctacaaagagacttagactcccacacaataataatgggagactttaacaccccactgtcaatattagacagatcagcgagacagaaaattaacaaggatactcagtacttgaactcagctctggatcaagtggacctagtagatgtctacagaactctctaccccaaatcaacagaatatacattcttctcagtgtacatggcacttatttgtcaattaaaattgaccacatatactcctcagcaagtgcaaaagaactgaaatcataacaaacagtctctctgaccacagtgcaatgaaattagatcttaggattaagaaactcactcaaaagcacacaatatcatggaaattgaacaacctgctcctgaacgactcctgggtaaataatgaaattaaagcagaaatcaagaagttctttgaaaccaatgagaacaaagagacaacgtaccagaatctctgggatacagctaaagcagtgtttttttgtttttttttttttttttttttttttttttttgagatggagtctcgctctttcacccaggctggactgcagtggcgctatcttggctcactgcaagctccgcctcccgggttcatgccattctcctgcctcaacctcccgagtagctgggactacaggcgcccgctaccacgcccagctaatttttttttgtatttttagtagagacggggtttcaccgtattagccaggatggtctcgacctcctgacctcgtgatccacccacctcggcctcccaaagtgctgggattacaggcgtgagccactgcgcccggcctaaagcagtgttaagagggaaatttatagcactaaatgcccaaatcaaaaagctagaaagacctcaaattgacagcctaacatcacaattaaaagagctaaagaggcgagagcaaactaatccaaaagctagcagaagacaagaaataactaagatcagagaaaaattgaaggagatagagacatgaaaaaccctccaaaaaaatcaatgaatccaggaactggtttttggaaaaaattaactaataaagaaggagagagagaagaatcaaatagacacaataaaaaatgataaaggggatatcaccactgaccccacagaaacacaaactaccatcagagaatactataaacacctctatgcaaataaactagaaaatctagaagaaatggataaattcctggacgcatacaccctaccaagactaaaccaggaagaaatttaacccctgaatagaccaataacaagctctgaaattgaggcagtaattaatagtctaccaaccaaaaaaagcccaggactagatggattcacagctgaattctaccagaaatacaaagaggagctggtaccattccttctgaaactattccaaacaattgagaagaagggactcccccctaactcattttatgaagccagaatcatcctgataccaaaaccaggaagagacagaataaaaaagaaaacttcaggccaatatccctgatgaacattgatgcaaaagtccttaataaaatactggcaaaccgaatccagcaacccatcaaaaaacttatccaccacgatcaatcagcttcatccctgggatgcaaggctgttttaacatacacaaatcaataaacgtaatccatcacataaacagaaccaaggacaaaaactacataattatctcaatagatgcagaaaacgcctttgataaaattcaacatcccttcacattaaaaactctcaataaactaggtactgatggaacatatctcaaaataataagagctatttatgataaacccacagccaatatcatattgaatggacaaaaactggaagcattccctttgaaaactggtacaagacaaggatgtcctttcttaccactcctattcaacatagtattggaagttttggccagggcaatcaaacaagagaaagaaataaagcatattcaaataggaagagaggaagtcaagttatctctgtttgcagttgagatgattttatatttagaaaaccccatcatctcagcccaaaaacttcttgaactgataagcaacttcagcaaagtctcaggatataaaatcaatgtgcaaaaatcgcaagcattcctttacaccaacaataggcaagcagagagccaaatcatgaatgaactcccattcataatcactacaaagagaataaaatatctaggaatacagctaccaaggaatgtgaaggacctcttcagggagaactacaaaccactgctcaagaaaataagagaggacacaaacaaatggaaaaacattccatccttatggataggaagaatcaatatcgtgaaaatggccatactgcccaaagtaatttatagattcaatgctattcccatcaaaccaccattgacattcttcacagaattagaaaaaaaaaaacttaaatttcatatggaattgaagaccccatatagccaaaacaatcctaagcaaaaagaacaaagctggaagcatcacgatacctgacttcaaactatactacaaggctacggtaaccaaaacagcatggtactggtaccaaaacagacatatagaccaatggagcaaaacaaagacctcagaaatagcaccacacatctacaaccatctgctctttgacaaacctgacaaaaacaagcaatggggaaaggaactcctattcagtatatggtgctgggaaaactggctagccatatgcataaaactgaaactggaccccttccttacaccttatacaaaaattaacgcaagatgaattaaagacttaaatgtaaaacccagagccataaaaaccctagaagaaaacctaggcaataccattcagaacacaggcatctgcaaagatttcctgatgaagacaccaaaagcaattgcaacaaaagccaaaattgacaactagaatcaaattaaagagttcctgcacagcaaaagaaactatcattggagtgaacaggcaacctacagaatgggagaaagtttttgcaatctacccatctgacaaaggtctaatagctggaatttacaaggaaattgaacaaatttacaagaaaaaaacaaatggccccatcaaaaattgggcaaagaatataaacagacacctctcaaaagaagacatttatgtagacaacaaacatgaaaaaaagctcaatgtataatgtatacatcactgatcatcagagaaatgcaaatcaaaaccacaatgagataccatctcacaccagtcagaatggtgattactaaaaagtcaggaatagatgctggcaaggctgtggagaaactgaaacacttttacactgttggtgggaatgtaaattagttaaaccattgtggaagacagtatggtgattcctcaaggatctagaaccagaaataccatttgacccagcaatcccattcctgggtatatacccaaaggaatataagtcattctactataaaaacacatgcacacatatttttacagcagcgctatttacagtagcaaggacatggaaccaacccaaatgcccattaacgatagactggttaaagaaaatgtggcacatatacaccatggaatgctatgcagtcataaaaaggaatgagatcatgtcctttgcagggacatggatgaagctggaagcaatcatcctcagcaaactaacacaggaacagaaaaccaaatactgcatgttcttattcataagtgggagttgaatattgagaacacatgaacacagataggggaataacatacaccagggcctgctggggtgggggttgaggggaggaaacttagatgggtcaataggtgcagcaaaccaccatggtgcacgtacacctatgtaacaaacctgcatgttctgcacatgtatccgttttttgtttttttttttttttttggtttttttttttttagaggaaattaaaaaaaaaaagacttagtacaggccgggcgcagtggctcacgcctgtaatcccagcactctgggaggccgaggtgggcagatcacgaggtcaggagatctagaccatcctggctaacacgaggaaaccccgtctctactaaaaatacaaaaaaattagccaggcatggtggcgggcgcctgtagtcccagctactcgggaggctgaggcaggagaacggcgtgaacccgggaggcggagcttgcagtgagctgagatcgcaccaccgcactcatgcctgggcgacagagtgagactccatctcaaaaaaaaaaaaaaaaagacttagtacaaagctacagtaaccaagacagtgcagtaatggcataatcattggcttagatttaagactcaaacatctatggtcaactgattttcatcaagagttccaagatctttcaataggaaaaggatttaatagtctcttaaacaaatggcacagggacaactggatagccacaagcaaagaatcaatttttacctttttctcacactatataaaaaaattatctcaaaatggatcaaagctctaaatgtaaatgctaaaactataaactcttagaagaaaacataagggtaaatcttcatgaccctgggtttggcataatgtcttaagatatgatccctaaagtgcaagtaacaaaagaaaaaaatcgataataggacttcatcaaaatttaaaacttttatgctttaaagaacactattaagaaagtgaaaacaaggccggccataatggctcaggcatgtaatcctagcactctgggaggccaaggcaggtggattgcttgagcccagcctaggcaacatagcaagaccctgtctcattaaaaaataaaaataaaatgtaaaaataaaaagcaaaaacaaccttcggatggagaaaatatttgcaaagcacata
